(19) United States
(12) Patent Application Publication
(10) Pub. No.: US 2012/0064100 A1
(43) Pub. Date: Mar. 15, 2012

(54) BIOMARKERS AND USES THEREOF

(76) Inventors: Simon Barry, South Australia (AU); Timothy John Sadlon, South Australia (AU); Stephen Martin Pederson, South Australia (AU); Bridget Gabrielle Wilkinson, South Australia (AU); Doreen Krumbiegel, Suth Australia (AU); Ian Cameron Nicholson, South Australia (AU); Heddy Zola, South Australia (AU)

(21) Appl. No.: 13/256,992

(22) PCT Filed: Mar. 18, 2010
(86) PCT No.: PCT/AU2010/000311

§ 371 Date: Nov. 28, 2011

Related U.S. Application Data
(60) Provisional application No. 61/161,255, filed on Mar. 18, 2009.

(51) Int. Cl. A61K 35/14; C12N 5/0783; A61P 37/02; C40B 30/04; C12Q 1/68; G01N 33/577; G01N 33/569; A61P 37/06

(52) U.S. Cl. 424/184.1; 435/2; 435/325; 506/9; 435/6.12; 435/7.24

(57) ABSTRACT

The present invention provides markers of regulatory T (Treg) cells, preferably, cell surface markers of Treg cells and uses of those markers or compounds that bind thereto to identify or isolate Treg cells or to diagnose/prognose/treat/prevent Treg-mediated conditions. The present invention also provides methods for identification and/or isolation of Treg cell subpopulations and such isolated subpopulations of Treg cells.

### INCORPORATION BY REFERENCE

[0001] The present application claims priority from U.S. Patent Application No. 61/161,255 entitled “Biomarkers and Uses Thereof” filed on 18 Mar. 2009, the entire contents of which are incorporated by reference.

### FIELD OF THE INVENTION

[0002] The present invention relates to nucleic acid or protein markers of regulatory T (Treg) cells and uses thereof.

### SEQUENCE LISTING

[0003] A Sequence Listing of nucleotide and amino acid sequences referenced in this application as “SEQ ID NO: 1-286” is submitted in computer readable form along with this application. The computer readable form of the Sequence Listing on these identical CD-ROMs is hereby incorporated by reference into this application.

### BACKGROUND OF THE INVENTION

[0004] T cells belong to a group of white blood cells known as lymphocytes, and play a central role in cell-mediated immunity and, to a lesser degree the adaptive immune response. Generally, T cells are distinguished from other lymphocytes (e.g., B cells and natural killer cells) by the presence of T cell receptors (TCRs). T cells have diverse roles, which are accomplished by differentiation of distinct populations of T cells, recognizable by discrete gene expression profiles. Exemplary T cell populations include Thelper cells (T_{H} cells), cytotoxic T cells (CTLs) and regulatory T cells (Treg cells).

[0005] Treg cells are characterized by expression of both CD4 and CD25 and the forkhead/winged transcription factor FoxP3. First characterized in mice, in which they constitute about 6-10% of lymph node and splenic CD4⁺ T cell populations, CD4⁺CD25⁺ cells represent about 5-10% of human CD4⁺ T cells (Wing and Sakaguchi, 2010). As discussed in more detail below, Treg cells have the ability to suppress the activity of CD4⁺ T cells and CD8⁺ T cells.

[0006] Treg cells can be divided into several subsets (Bluestone et al., 2000). One subset of Treg cells develops in the thymus (also known as natural Treg (nTreg) cells), and these thymic-derived Treg cells function by a cytokine-independent mechanism, which involves cell to cell contact (Shevach, 2002). These cells are essential for the induction and maintenance of self-tolerance and for the prevention of autoimmunity (Shevach, 2000; Salomon et al., 2000; Sakaguchi et al., 2001). These regulatory cells prevent the activation and proliferation of autoreactive T cells that have escaped thymic deletion or recognize extrathymic antigens, and, as a consequence are critical for homeostasis and immune regulation, as well as for protecting the host against the development of autoimmunity (Suri-Payer et al., 1996; Asano, 1996; Willerford et al., 1995; Salomon et al., 2000).

[0007] Treg cells can also be generated by the activation of mature, peripheral CD4⁺ T cells (these cells are known as induced Treg (iTreg) cells). These cells can be generated ex vivo, e.g., by exposure to growth factors, and in vivo, e.g., in the gastrointestinal tract. Studies have indicated that peripherally derived Treg cells mediate their inhibitory activities by producing immunosuppressive cytokines, such as transforming growth factor-beta (TGF-β) and IL-10 (Kingsley 2002; Nakamura 2001). After antigen-specific activation, these Treg cells can non-specifically suppress proliferation of either CD4⁺ or CD8⁺ T cells (Baecher-Allan 2001). Studies have shown that CD4⁺CD25⁺ cells are able to inhibit anti-CD3 stimulation of T cells when co-cultured with autologous antigen presenting cells (APC) (e.g., Stephens 2001; Taams 2001).

[0008] While both nTreg cells and iTreg cells have regulatory activity, a recent study indicates that iTreg cells lose this activity in vivo in a study of graft-versus-host disease (GVHD; Koenecke et al., 2009). In contrast nTreg cells maintain their regulatory activity and prevented development of GVHD. Thus, it is desirable to be able to identify/isolate populations of nTreg cells.

[0009] The immunomodulatory activity of Treg cells can be contact dependent, or the Treg cells may kill CD4⁺ and CD8⁺ T cells in a perforin- or granzyme-dependent manner or by the secretion of immunosuppressive cytokines, e.g., IL-10 and/or TGF-β (as reviewed in Dejaco 2005).

### Treg Cells and Autoimmunity/Tolerance

[0010] Depletion of Treg cells from various mouse strains has been shown to lead to a variety of autoimmune diseases that are tissue specific, including thyroiditis, oophoritis, gastritis or inflammatory bowel disease (Asano, 1996; Suri-Payer, 1998; and McHugh, 2002). Furthermore, human patients having a mutation in the FoxP3 gene fail to produce Treg cells and develop autoimmune polyendocrinopathy (especially type I diabetes and hypothyroidism) and enteropathy (summarized as immunodysregulation, polyendocrinopathy, enteropathy X-linked (IPEX) syndrome). A polymorphism in the FoxP3 is associated with autoimmune diabetes. Moreover, mice deficient in FoxP3 develop an IPEX like syndrome (see, Dejaco et al., 2005).

[0011] The level of Treg cells is reduced in subjects suffering from a variety of disorders as shown in Table 1. Moreover, lower levels of these cells are associated with higher disease activity and/or poorer prognosis.

TABLE 1
Autoimmune diseases associated with reduced levels of circulating
CD4⁺CD25⁺ cells.

| | Level of | |
|---|---|---|
| | CD4+CD25+ | |
| | cells (control) and | |
| Disease | significance | Reference |
| Juvenile idiopathic arthritis | 1.2 (1.6)*** | De Kleer (2004) |
| Juvenile idiopathic arthritis | 0.4 (1.2)*** | Cao et al., (2004). |
| Rheumatoid arthritis | 0.7 (1.2)* | Cao et al., supra. |
| Rheumatoid arthritis | 1.2 (3.7)* | Liu et al., (2004). |
| Psoriatic arthritis | 0.6 (1.2)* | Cao et al., supra. |
| HCV mixed cryoglobulinemia | 2.6 (7.9)** | Boyer et al., (2004) |
| Autoimmune liver disease | 2.5 (6.8)*** | Longhi et al., (2004). |
| Systemic lupus erythematodes | 1.8 (3.7)* | Cao et al., supra. |
| (SLE) | | |
| SLE | 0.9 (2.6)* | Crispin et al., (2003). |

*p < 0.05;
**p < 0.01,
***p < 0.001.

[0012] Increased levels of CD4⁺CD25⁺ T cells are observed at sites of inflammation, e.g., in subjects suffering from juvenile idiopathic arthritis, rheumatoid arthritis, sponyloarthritis and infections (as reviewed in Dejaco et al., 2005). These cells are considered to modulate local immune responses, e.g., to prevent collateral tissue damage.

[0013] Adoptive transfer of CD4⁺CD25⁺ T cells prevents the development of these diseases and, in some models can cure the disease after initiation (Mottet et al., 2003). Suri-Payer et al., (1998) also found that CD4⁺CD25⁺ T cells could prevent autoimmunity induced by autoantigen-specific T cell clones. Transfer of CD4⁺CD25⁻ T cells into nude mice also leads to development of autoimmune disease, which can be prevented by co-transfer of CD4⁺CD25⁺ T cells (Sakaguchi et al., 1995).

[0014] Tang et al., (2004) demonstrated that Treg cells are also useful for the treatment of autoimmune diabetes. The authors isolated Treg cells from non-obese diabetic (NOD) mice and expanded TCR transgenic cells specific for an autoantigen. Adoptive transfer of these cells to NOD mice reversed diabetes in newly transgenic mice.

[0015] Studies by Trenado (2002) also demonstrated that infusion of ex vivo activated and expanded CD4⁺CD25⁺ T cells significantly inhibit rapidly-lethal graft-versus-host disease (GVHD) in mice. Treg cells have also been shown to suppress allograft rejection in rodents with long term surviving cardiac (Van Maurik, 2002) or pancreatic islet (Gregori, 2001) allografts.

[0016] Based on the foregoing, it will be apparent to the skilled artisan that Treg cells are attractive for treatment or prevention of autoimmune disease or for inducing tolerance in a subject or that the detection of circulating levels of Treg cells is useful for the diagnosis or prognosis of those disorders. However, difficulties have arisen in translating the results of animal models to the human situation as a result of insufficient markers that permit isolation of Treg cells. To date, the only marker that clearly distinguishes Treg cells from other T cells is FoxP3. FoxP3 is an intracellular protein and, as a consequence, is not useful as a marker for isolating viable Treg cells. Accordingly, there is a need in the art for new markers, preferably cell surface markers of Treg cells that permit detection and/or isolation of those cells, e.g., for diagnostic and/or therapeutic and/or prophylactic purposes.

### Treg Cells and Inducing an Immune Response

[0017] Treg cells also exist in markedly higher proportions within tumor-infiltrating lymphocytes, peripheral blood lymphocytes, and/or regional lymph node lymphocytes of patients with cancer. The frequency of cells is related to tumor progression and inversely correlated with the efficacy of treatment. Accordingly, the ability of Treg cells to suppress anti-self immune responses appears to suppress the ability of the immune system to kill tumor cells.

[0018] Wang et al., (2004) isolated a CD4⁺CD25⁺ tumor-infiltrating lymphocyte (TIL) from a human melanoma patient. This TIL recognized a tumor/self-antigen, LAGE-1. CD4⁺CD25⁺ TILs have also been isolated from ascites of patients with ovarian cancer, and these cells were shown to be capable of suppressing T cell activity (Curiel et al., 2004).

[0019] Depleting populations of Treg has also been demonstrated to improve significantly the clearance of injected tumor cells. For example, Jones et al., (2002), depletion of CD25 expressing T cells using monoclonal antibody therapy facilitated long-term CD4+ T cell-mediated immunity against melanoma cells. The authors demonstrated that following anti-CD25 treatment, mice developed an immune response against a self-antigen (tyrosinase) that accompanies inhibition of tumor growth in mice.

[0020] Goforth et al., (2008) also demonstrated that poly lactic-co-glycolic acid (PLGA) polymer particles loaded with antigenic tumor lysate and immune stimulatory CpG oligonucleotides efficiently activated antigen-presenting cells and were incorporated into lysosomal compartments of macrophages and dendritic cells. Vaccination with the immune stimulatory antigen loaded particles (ISAPs) resulted in remarkable T cell proliferation, but only modestly suppressed tumor growth of established melanoma. When CD25⁺ cells were suppressed with anti-CD25 antibody, ISAP vaccination induced complete antigen-specific immunity in a prophylactic model. These findings suggest that it may be necessary or desirable to suppress Treg cell activity prior to and/or during vaccination, particularly against self-antigens.

[0021] It will be apparent from the foregoing discussion that depletion of Treg cells provides an attractive means for improving an immune response, e.g., against a self antigen or a non-self antigen. However, as discussed above, insufficient markers that permit removal of Treg cells has hampered therapeutic strategies targeting these cells. For example, while the cell surface marker CD25 is highly expressed on Treg cells and has been traditionally used to isolate or target these cells, this protein is also expressed on other T cell populations (e.g., activated T cells) in addition to activated B cells, some thymocytes, myeloid precursors, and oligodendrocytes. Accordingly, there is a need in the art for new markers, preferably cell surface markers of Treg cells that permit removal or destruction of Treg cells, e.g., for diagnostic, prognostic, therapeutic and/or prophylactic purposes.

### SUMMARY OF INVENTION

[0022] The inventors have identified cell surface proteins and genes encoding same that are differentially expressed on Treg cells, particularly, Treg cells expressing FoxP3. The inventors have also identified cell surface proteins (and genes encoding same) that are differentially expressed on specific subpopulations of Treg cells, e.g., natural Treg cells, and/or memory Treg cells, e.g., natural memory Treg cells. These proteins are expressed at higher or lower levels on Treg cells compared to other cell types, e.g., non-Treg T cells, such as Thelper cells. The inventors also identified proteins differentially expressed on activated Treg cells compared to naïve Treg cells.

[0023] Accordingly, an example of the present invention provides a method for detecting a regulatory T (Treg) cell comprising determining the level of expression of a nucleic acid or protein set forth in Table 2 and/or Table 3, or a nucleic acid or protein having at least about 70% identity thereto, in/on a T cell, wherein an increased level of expression of a nucleic acid or protein set forth in Table 2 or a nucleic acid or protein having at least about 70% identity thereto compared to another cell type, or a reduced level of expression of a nucleic acid or protein set forth in Table 3 or a nucleic acid or protein having at least about 70% identity thereto compared to another cell type is indicative of a Treg cell.

[0024] In one example, the method comprises determining the level of expression of a nucleic acid or protein set forth in Table 4 or a nucleic acid or protein having at least about 70% identity thereto in/on a T cell, wherein an increased level of expression of said nucleic acid or protein compared to another cell type is indicative of a Treg cell.

[0025] Preferably, the protein is PI16 or the nucleic acid encodes PI16. Preferably, the protein is Interleukin 1 receptor, type I (IL1R1) (CD121) or the nucleic acid encodes Interleukin 1 receptor, type I (IL1R1) (CD121). Preferably, the protein is PKD1L3 or the nucleic acid encodes PKD1L3. Preferably, the protein is PTPRB or the nucleic acid encodes PTPRB. Preferably, the protein is CD146 or the nucleic acid encodes CD146. Preferably, the protein is C18orf1 or the nucleic acid encodes C18orf1. Preferably, the protein is AQP3 or the nucleic acid encodes AQP3. Preferably, the protein is RGMB or the nucleic acid encodes RGMB. Preferably, the protein is CD49f or the nucleic acid encodes CD49f. Preferably, the protein is PERP or the nucleic acid encodes PERP. Preferably, the protein is LSR or the nucleic acid encodes LSR.

[0026] In one example, the level of expression of the nucleic acid or protein is increased or reduced compared to the level of expression of the nucleic acid or protein in a T cell other than a Treg cell and, preferably, in a Thelper cell, preferably a stimulated Thelper cell or a resting Thelper cell. Preferably, the cell other than a Treg cell is a T cell expressing CD4 and expressing low levels of CD25 or levels of CD25 no greater than background (e.g., the level of an isotype control antibody).

[0027] In one example, the method detects an activated Treg cell and comprises determining the level of expression of a nucleic acid or protein set forth in Table 5 and/or Table 6, or a nucleic acid or protein having at least about 70% identity thereto, in/on a T cell, wherein an increased level of expression of a nucleic acid or protein set forth in Table 5 or a nucleic acid or protein having at least about 70% identity thereto compared to a non-activated Treg cell, or a reduced level of expression of a nucleic acid or protein set forth in Table 6 or a nucleic acid or protein having at least about 70% identity thereto compared to a non-activated Treg cell is indicative of an activated Treg cell.

[0028] Preferably, the protein is Interleukin 1 receptor, type I (IL1R1) (CD121) or the nucleic acid encodes Interleukin 1 receptor, type I (IL1R1) (CD121).

[0029] In one example, the method comprises initially isolating a population of cells comprising Treg cells, e.g., using a method as described herein, and then identifying an activated Treg cell.

[0030] In one example, the level of expression of a protein set forth in Table 2 and/or Table 3 and/or Table 4 and/or Table 5, or a protein having at least about 70% identity thereto, in/on the T cell is determined by contacting the cell with a compound that binds to said protein for a time and under conditions sufficient for a compound-protein complex to form and detecting the level of said complex, wherein the level of said complex is indicative of the level of said protein on said T cell. In this respect, any compound that binds specifically to the protein is suitable for performance of the invention.

[0031] Preferred compounds include antibodies and proteins comprising an antibody variable region.

[0032] In one example, the method additionally comprises detecting a cell that expresses CD4 and/or CD25. Optionally, the method additionally comprises detecting a cell that expresses a low or undetectable level of CD127 or a cell that is CD127⁻.

[0033] In one example, the method detects an iTreg cell and/or a nTreg cell. In one example, the method detects an iTreg cell. Preferably, the method detects a nTreg cell.

[0034] In one example, the Treg cell is a naïve Treg cell, an effector memory Treg cell or a memory Treg cell.

[0035] Alternatively, or in addition, the method comprises detecting a cell that expresses low or undetectable levels of markers of T cells other than Treg cells, e.g., CD19 and/or CD20 and/or CD14 and/or CD56.

[0036] The present inventors have also demonstrated that the marker PI16 is useful for identifying nTreg cells, such as memory nTreg cells, e.g., resting (or non-activated) memory nTreg cells.

[0037] In one example, the cell expresses PI16, CD4 and CD25 and, optionally low or undetectable levels of CD127. Preferably, the cell additionally expresses CD45R0 and/or CD27 and/or CD95 and/or CCR6. Preferably, the cell expresses low levels, of CD45RA (or is CD45RA⁻), CD146 (or is CD146⁻) and CXCR5 (or is CXCR5⁻))

[0038] Accordingly, the methods described herein according to any embodiment or example shall be taken to apply mutatis mutandis to the detection of PI16 nucleic acid or protein to identify or isolate nTreg cells, such as memory nTreg cells, e.g., resting (or non-activated) memory nTreg cells or to diagnose, prognose or treat conditions associated with those cells.

[0039] In one example, the method is performed using a sample from a subject, e.g., a blood sample or fraction thereof (e.g., plasma or serum or buffy coat fraction or peripheral blood mononuclear cell fraction) or a thymus or part thereof. Alternatively, the method is performed using one or more isolated cells or a lysate or extract thereof.

[0040] Another example of the present invention provides a method for isolating a regulatory T (Treg) cell, said method comprising detecting a Treg cell by performing the method as described herein according to any embodiment and isolating the detected Treg cell.

[0041] Another example of the present invention provides a method for isolating a population of cells enriched for regulatory T (Treg) cells, said method comprising:
[0042] (i) contacting a population of cells comprising Treg cells with a compound that binds to a protein set forth in Table 2 and/or 4 or a protein having at least about 70% identity thereto for a time and under conditions sufficient for said compound to bind to a cell and isolating cells to which the compound is bound; and/or
[0043] (ii) contacting said population with a compound that binds to a protein set forth in Table 3 or a protein having at least about 70% identity thereto for a time and under conditions sufficient for said compound to bind to a cell and isolating cells to which the compound binds to a reduced level compared to other cells in the population.

[0044] Preferably, (i) comprises isolating cells to which the compound binds to an increased level compared to other cells in the population.

[0045] Preferably, the protein is PI16 or the nucleic acid encodes PI16. Preferably, the protein is Interleukin 1 receptor, type I (IL1R1) (CD121) or the nucleic acid encodes Interleukin 1 receptor, type I (IL1R1) (CD121). Preferably, the protein is PKD1L3 or the nucleic acid encodes PKD1L3. Preferably, the protein is PTPRB or the nucleic acid encodes PTPRB. Preferably, the protein is CD146 or the nucleic acid encodes CD146. Preferably, the protein is C18orf1 or the nucleic acid encodes C18orf1. Preferably, the protein is AQP3 or the nucleic acid encodes AQP3. Preferably, the protein is RGMB or the nucleic acid encodes RGMB. Preferably, the protein is CD49f or the nucleic acid encodes CD49f. Preferably, the protein is PERP or the nucleic acid encodes PERP. Preferably, the protein is LSR or the nucleic acid encodes LSR.

[0046] In one example, the present invention provides a method for isolating a population of cells enriched for activated regulatory T (Treg) cells, said method comprising
[0047] (i) contacting said population with a compound that binds to a protein set forth in Table 5 or a protein having at least about 70% identity thereto for a time and under conditions sufficient for said compound to bind to a cell and isolating a cell(s) to which the compound is bound; and/or
[0048] (ii) contacting said population with a compound that binds to a protein set forth in Table 6 or a protein having at least about 70% identity thereto for a time and under conditions sufficient for said compound to bind to a cell and isolating cells to which the compound binds to a reduced level compared to other cells in the population.

[0049] Preferably, the protein is Interleukin 1 receptor, type I (IL1R1) (CD121) or the nucleic acid encodes Interleukin 1 receptor, type I (IL1R1) (CD121).

[0050] In an example, the compound that binds to the protein is an antibody or a protein comprising an antibody variable region.

[0051] The skilled artisan will be aware of suitable methods for isolating cells making use of compounds that bind to proteins, such as fluorescence-activated cell sorting (FACS) or magnetic cell separation cell techniques, e.g., MACS or techniques using Dynabeads™.

[0052] In one example, the population of cells is a population of T cells and/or a population of cells expressing CD4 and/or CD25. Optionally, the cells express low or undetectable levels of CD127 or a cell that is CD127⁻.

[0053] In one example, the method detects an iTreg cell and/or a nTreg cell. In one example, the method detects an iTreg cell. Preferably, the method detects a nTreg cell.

[0054] In one example, the Treg cell is a naïve Treg cell, an effector memory Treg cell or a memory Treg cell.

[0055] Alternatively, or in addition, the method comprises depleting the population of cells and/or the isolated cells of cells expressing CD19 and/or CD20 and/or CD14 and/or CD56.

[0056] In one example, the enriched population is isolated from a sample from a subject, e.g., a blood sample or fraction thereof (e.g., plasma or serum or buffy coat fraction or peripheral blood mononuclear cell fraction) or a thymus or part thereof. Accordingly, the present invention also encompasses a method additionally comprising providing or obtaining a sample from a subject. Such a sample may have been isolated previously from a subject, e.g., the method is performed in vitro or ex vivo. The population of cells can also be an isolated population of cells, e.g., produced using tissue culture techniques.

[0057] In one example, the method additionally comprises culturing the isolated cells, e.g., to increase the number of Treg cells. Alternatively, or in addition, in the case of non-activated Treg cells, the method can comprise activating the Treg cells.

[0058] In an example, the method additionally comprises formulating the isolated Treg cells with a pharmaceutically acceptable carrier or excipient to thereby produce a pharmaceutical composition.

[0059] The skilled artisan will appreciate that a method for identifying Treg cells in a sample from a subject is useful for diagnosing or prognosing a condition associated with Treg cells, e.g., by assessing the number of Treg cells in the sample. Such assessment can be made using standard techniques, e.g., FACS, MACS, immunohistochemistry or immunofluorescence. Accordingly, an example of the present invention provides a method for diagnosing and/or prognosing a Treg-associated condition in a subject, said method comprising performing a method as described herein according to any embodiment to detect a Treg cell in a sample from a subject wherein detection of Treg cell(s) or failure to detect Treg cells indicates that the subject suffers from a Treg-associated condition.

[0060] Suitable conditions are described herein, including in the Background of Invention section and shall be taken to apply mutatis mutandis to the embodiments and examples herein in relation or diagnosis/prognosis/treatment/prevention of a condition associated with Treg cells.

[0061] In one example, the method comprises:
[0062] (i) determining or estimating the number of Treg cells in the sample or a portion thereof;
[0063] (ii) comparing the number of Treg cells determined or estimated at (i) to the number of Treg cells in a sample from a normal and/or healthy subject;
   wherein an increased or decreased number of Treg cells at (i) compared to the number of Treg cells in a sample from a normal and/or healthy subject indicates that the subject suffers from a Treg-associated condition.

[0064] In one example, the subject is receiving treatment for the condition and wherein:
[0065] (i) a similar number of Treg cells at (i) compared to the number of Treg cells in a sample from a normal and/or healthy subject indicates that the subject is responding to treatment for said Treg-associated condition;
[0066] (ii) an increased or decreased number of Treg cells at (i) compared to the number of Treg cells in a sample from a normal and/or healthy subject indicates that the subject is not responding to treatment for said Treg-associated condition;
[0067] (iii) an increased or decreased number of Treg cells compared to the number of Treg cells in a sample from the subject prior to treatment indicates that the subject is responding to treatment for said Treg-associated condition; or
[0068] (iv) a similar number of Treg cells at (i) compared to the number of Treg cells in a sample from the subject prior to treatment indicates that the subject is not responding to treatment for said Treg-associated condition.

[0069] In one example, the method comprises contacting a sample with a compound that binds to a protein set forth in Table 2 and/or Table 4 for a time and under conditions sufficient for the compound to bind to a cell expressing said protein and determining the number of cells to which the compound has bound. Preferably, the compound is labeled with a detectable marker to facilitate detection. Preferred compounds include antibodies and proteins comprising an antibody variable region.

[0070] The skilled artisan will also appreciate that the provision of markers of Treg cells provides the basis for methods for diagnosing and/or prognosing a Treg-associated condition without necessarily assessing the number of cells in a sample, e.g., by detecting the level of the marker(s) in a sample, e.g., using an immunoassay. Accordingly, the present invention additionally provides a method for diagnosing and/or prognosing a Treg-associated condition in a subject, said method comprising:

(i) detecting the level of a nucleic acid or protein set forth in Table 2 or a nucleic acid or protein having at least about 70% identity thereto in a sample from a subject;
(ii) comparing the level at (i) to the level of the nucleic acid or protein in a normal and/or healthy subject,
wherein an increased or reduced level of the nucleic acid or protein at (i) compared to the level in the normal and/or healthy subject indicates that the subject suffers from a Treg-associated condition.

[0071] Preferably, the method comprises detecting the level of a protein set forth in Table 4.

[0072] In one example, the subject is receiving treatment for said condition and wherein
[0073] (i) a similar level of the nucleic acid or protein at (i) compared to the level of the nucleic acid or protein in a sample from a normal and/or healthy subject indicates that the subject is responding to treatment for said Treg-associated condition;
[0074] (ii) an increased or decreased level of the nucleic acid or protein at (i) compared to the level of the nucleic acid or protein in a sample from a normal and/or healthy subject indicates that the subject is not responding to treatment for said Treg-associated condition;
[0075] (iii) an increased or decreased level of the nucleic acid or protein compared to the level of the nucleic acid or protein in a sample from the subject prior to treatment indicates that the subject is responding to treatment for said Treg-associated condition; or
[0076] (iv) a similar level of the nucleic acid or protein at (i) compared to the level of the nucleic acid or protein in a sample from the subject prior to treatment indicates that the subject is not responding to treatment for said Treg-associated condition.

[0077] In one example, the method comprises contacting a sample with a compound that binds to a protein set forth in Table 2 and/or Table 4 for a time and under conditions sufficient for a compound-protein complex to form and determining the level of said complex. Preferably, the compound is labeled with a detectable marker, to facilitate detection.

[0078] Preferred compounds include antibodies or proteins comprising an antibody variable region.

[0079] Preferred Treg-associated conditions for diagnosis/prognosis using a method as described herein according to any embodiment include the following
[0080] An autoimmune disease, e.g., juvenile idiopathic arthritis, rheumatoid arthritis, psoriatic arthritis, HCV mixed cryoglobulinemia, autoimmune liver disease or SLE, which is/are diagnosed/prognosed by detecting reduced levels of Treg cells or a reduced level of a protein expressed at a higher level on Treg cells in a sample, e.g., a blood sample or a fraction thereof;
[0081] Inflammation, e.g., caused by juvenile idiopathic arthritis, rheumatoid arthritis, sponylarthritis or infection, which is/are diagnosed/prognosed by detecting increased levels of Treg cells or an increased level of a protein expressed at a higher level on Treg cells in, e.g., a sample from the site of inflammation or predicted inflammation (e.g., synovial fluid);
[0082] Cancer(s) (e.g., cancers refractory to treatment with a vaccine or antigen-specific T cells), which is/are diagnosed/prognosed by detecting increased levels of Treg cells or an increased level of a protein expressed at a higher level on Treg cells in a sample, e.g., a sample of the cancer or in a blood sample or, a fraction thereof.

[0083] Preferably, the condition is an autoimmune disease, preferably, rheumatoid arthritis. The present invention also contemplates autoimmune diseases, such as, type 1 diabetes, multiple scerosis or inflammatory bowel disease.

[0084] Preferably, the condition is a cancer. Preferably, the cancer is a hematological cancer. Preferably, the cancer is a breast cancer. Preferably, the cancer is a colorectal cancer. Preferably, the cancer is a prostate cancer. Other examples of suitable cancers include brain cancer (e.g., glioma), gastric cancer, cervical cancer, melanoma and lymphoma (e.g., Hodgkin's lymphoma).

[0085] Additional suitable conditions are described herein, including in the Background of Invention section, and shall be taken to apply mutatis mutandis to the present example of the invention.

[0086] The skilled artisan will appreciate that methods described herein for isolating a Treg cell also provide the basis for increasing Treg cell numbers in a subject, e.g., by adoptive transfer or cell therapy. Increasing Treg cells numbers is useful for, for example, treating or preventing a condition associated with reduced Treg numbers and/or inducing immunosuppression in a subject and/or reducing CTL or Thelper cell activity in a subject. Accordingly, another example of the present invention provides a method of treating or preventing a condition associated with reduced Treg cell numbers or activity, and/or inducing immunosuppression, and/or reducing CTL or Thelper cell activity in a subject, said method comprising:
[0087] (i) isolating a population of Treg cells by performing a method as described herein according to any embodiment; and
[0088] (ii) administering the cells at (i) to the subject.

[0089] In one example, the subject suffers from or is at risk of developing a condition associated with reduced Treg numbers and/or activity and/or requires a reduction in CTL or Thelper cell activity (e.g., the subject suffers from or is at risk of developing an autoimmune disease) and/or the subject requires immunosuppression (e.g., is undergoing or about to undergo a transplant or suffers from graft-versus-host disease).

[0090] Preferably, the cells are from the subject to be treated, i.e., an autologous transplant, or from a related subject of the same species (e.g., a HLA matched subject), i.e., an allogeneic transplant. The present invention also encompasses xenogeneic transplants.

[0091] Preferably an effective amount, e.g., a therapeutically or prophylactically effective amount of cells is administered.

[0092] The identification of cell surface proteins preferentially expressed by Treg cells also provides the means for depleting or reducing the number of those cells in a subject, e.g., to reduce or prevent Treg cell-mediated suppression of a subject's immune system. Accordingly, another example of the present invention provides a method of treating or preventing a condition associated with regulatory T (Treg) cell-mediated suppression of a subject's immune system, said method comprising administering to a subject in need thereof a compound that reduces expression and/or activity of a protein or nucleic acid set forth in Table 2 and/or that administering to a subject in need thereof a compound that increases expression and/or activity of a protein or nucleic acid set forth in Table 3.

[0093] In one example, the invention provides a method of treating or preventing a condition associated with Treg-mediated suppression of a subject's immune system and/or for inducing or enhancing an immune response in a subject, said method comprising administering to a subject in need thereof a compound (preferably an effective amount of said compound) that binds to a protein set forth in Table 2 and/or Table 4 and reduces Treg cell activity and/or induces Treg cell death for a time and under conditions sufficient to reduce Treg cell numbers and/or activity in the subject. Exemplary compounds include antibodies and/or proteins comprising an antibody variable region, such as, conjugates of said antibodies or proteins comprising a toxic compound to thereby kill a Treg cell.

[0094] Preferably, the protein is PI16 or the nucleic acid encodes PI16. Preferably, the protein is Interleukin 1 receptor, type I (IL1R1) (CD121) or the nucleic acid encodes Interleukin 1 receptor, type I (IL1R1) (CD121). Preferably, the protein is PKD1L3 or the nucleic acid encodes PKD1L3. Preferably, the protein is PTPRB or the nucleic acid encodes PTPRB. Preferably, the protein is CD146 or the nucleic acid encodes CD146. Preferably, the protein is C18orf1 or the nucleic acid encodes C18orf1. Preferably, the protein is AQP3 or the nucleic acid encodes AQP3. Preferably, the protein is RGMB or the nucleic acid encodes RGMB. Preferably, the protein is CD49f or the nucleic acid encodes CD49f. Preferably, the protein is PERP or the nucleic acid encodes PERP. Preferably, the protein is LSR or the nucleic acid encodes LSR.

[0095] In one example, the subject suffers from a cancer, and reduction in Treg cell numbers and/or activity in the subject induces an immune response against the cancer.

[0096] Preferably, the condition is a cancer. Preferably, the cancer is a hematological cancer. Preferably, the cancer is a breast cancer. Preferably, the cancer is a colorectal cancer. Preferably, the cancer is a prostate cancer.

[0097] In another example, the compound is administered prior to or at the time of administration of a composition comprising an immunogenic compound, e.g., a vaccine. Preferably, the immunogenic compound is capable of inducing or enhancing a T cell response in a subject, e.g., a Thelper cell response or a CTL response. Exemplary immunogenic compounds will be apparent to the skilled artisan and include, for example, an antigen expressed by a cancer or an epitope thereof or an antigen of a pathogenic organism or an epitope thereof.

[0098] Preferred compounds bind to a protein set forth in Table 4.

[0099] Exemplary compounds include antibodies or proteins comprising an antibody variable region. Preferably, the antibody or protein reduces Treg cell function and/or induces Treg cell death. In one example, the antibody or protein is conjugated to a toxic compound to thereby induce Treg cell death.

[0100] Another example of the present invention provides an antibody or a protein comprising a variable region of an antibody that binds specifically to a protein set forth in Table 2 or 3 or an immunogenic fragment or epitope thereof.

[0101] For example, the antibody or protein binds specifically to a protein set forth in Table 4. Preferably, the protein is PI16 or the nucleic acid encodes PI16. Preferably, the protein is PKD1L3 or the nucleic acid encodes PKD1L3. Preferably, the protein is PTPRB or the nucleic acid encodes PTPRB. Preferably, the protein is CD146 or the nucleic acid encodes CD146. Preferably, the protein is C18orf1 or the nucleic acid encodes C18orf1. Preferably, the protein is AQP3 or the nucleic acid encodes AQF3. Preferably, the protein is RGMB or the nucleic acid encodes RGMB. Preferably, the protein is CD49f or the nucleic acid encodes CD49f. Preferably, the protein is PERP or the nucleic acid encodes PERP. Preferably, the protein is LSR or the nucleic acid encodes LSR.

[0102] In another example, the antibody or protein binds specifically to a protein comprising a sequence set forth in any one or more of SEQ ID NOs: 84, 88, 90, 94, 96, 98, 100, 102, 104, 106, 108 or 110.

[0103] Exemplary preferred antibodies are chimeric antibodies, humanized antibodies or human antibodies.

[0104] Another example of the present invention provides a pharmaceutical composition comprising an antibody and/or protein of the present invention and a pharmaceutically acceptable carrier or excipient. Preferably, the composition comprises an effective amount of said antibody or protein.

[0105] Antibodies or proteins as described herein according to any embodiment can be used in any method described herein requiring a compound that binds a protein. Another example of the present invention provides for the use of a compound that binds to a protein set forth in any one of Tables 2-6 (e.g., an antibody and/or protein and) or a population of cells of the present invention in medicine or in the manufacture of a medicament for administration to a subject in need thereof, e.g., to treat a Treg-associated condition. Another example of the present invention provides a compound that binds to a protein set forth in any one of Tables 2-6 (e.g., an antibody and/or protein and) or a population of cells of the present invention for use in medicine or in the treatment of a Treg-associated condition.

[0106] Another example, of the present invention provides a nucleic acid encoding an antibody or protein of the present invention. Such a nucleic acid may be included in an expression vector, e.g., in operable connection with a promoter.

[0107] Another example of the present invention provides a cell expressing an antibody or protein of the present invention, e.g., a hybridoma or a transfectoma.

[0108] Another example of the present invention provides a method for identifying or isolating a compound that modulates regulatory T (Treg) cell function, said method comprising identifying or isolating a compound that reduces expression and/or activity of a nucleic acid or protein set forth in Table 2 in a Treg cell and/or increases expression of a nucleic acid or protein set forth in Table 3 in a Treg cell.

[0109] Another example of the present invention provides a method for identifying or isolating a compound that binds a regulatory T (Treg) cell, said method comprising identifying or isolating a compound that binds to a protein set forth in Table 2.

[0110] Preferably, the method additionally comprises determining a compound that enhances or reduces Treg cell activity and/or that induces Treg cell death, to thereby identify or isolate a compound that modulates Treg cell function.

[0111] The present invention also provides a population of cells enriched for Treg cells expressing one or more of the nucleic acids or proteins set forth in Table 2 and/or expressing a reduced level of one or more of the nucleic acids or proteins set forth in Table 3.

[0112] Preferably, the population of cells is enriched for Treg cells expressing one or more of the nucleic acids or proteins set forth in Table 4.

[0113] Preferably, the protein is PI16 or the nucleic acid encodes PI16. Preferably, the protein is Interleukin 1 receptor, type I (IL1R1) (CD121) or the nucleic acid encodes Interleukin 1 receptor, type I (IL1R1) (CD121). Preferably, the protein is PKD1L3 or the nucleic acid encodes PKD1L3. Preferably, the protein is PTPRB or the nucleic acid encodes PTPRB. Preferably, the protein is CD146 or the nucleic acid encodes CD146. Preferably, the protein is C18orf1 or the nucleic acid encodes C18orf1. Preferably, the protein is AQP3 or the nucleic acid encodes AQP3. Preferably, the protein is RGMB or the nucleic acid encodes RGMB. Preferably, the protein is CD49f or the nucleic acid encodes CD49f. Preferably, the protein is PERP or the nucleic acid encodes PERP. Preferably, the protein is LSR or the nucleic acid encodes LSR.

[0114] In one example, the population of cells is enriched for iTreg cells and/or nTreg cells, more preferably, nTreg cells.

[0115] In one example, the population of cells is enriched for naïve Treg cells, effector memory Treg cells or memory Treg cells.

[0116] Preferably, the population is additionally enriched for cells expressing one or more of CD4 and/or CD25. Optionally, the population is additionally enriched for cells expressing low or undetectable levels of CD127 or that are CD127⁻.

[0117] In one example, the population of cells is enriched for cells expressing CD4, CD25 and PI16. Optionally, the population of cells is also enriched for cells expressing low or undetectable levels of CD127. Preferably, the population is additionally enriched for cells expressing one or more of CD45R0 and/or CD27 and/or CD95 and/or CCR6. Preferably, the population is additionally enriched for cells expressing low or undetectable levels of CD127 and/or CD45RA and/or CD146 and/or CXCR5.

[0118] Preferably, such a population of cells is enriched for nTreg cells, e.g., memory nTreg cells, such as resting memory nTreg cells.

[0119] In one example, the population of cells is enriched for cells expressing CD4, CD25, CD45R0, CD27, CD95, CCR6 and PI16 and expressing low or undetectable levels of CD45RA, CD127, CD146 and CXCR5.

[0120] In one example, the population of cells is enriched for cells expressing CD4, CD25 and AQP3. Optionally, the population of cells is also enriched for cells expressing low or undetectable levels of CD127.

[0121] In one example, the population of cells is enriched for cells expressing CD4, CD25 and C18orf1. Optionally, the population of cells is also enriched for cells expressing low or undetectable levels of CD127.

[0122] In one example, the population of cells is enriched for cells expressing CD4, CD25 and CD121. Optionally, the population of cells is also enriched for cells expressing low or undetectable levels of CD127.

[0123] In one example, the population of cells is enriched for cells expressing CD4, CD25 and CD146. Optionally, the population of cells is also enriched for cells expressing low or undetectable levels of CD127.

[0124] In one example, the population of cells is enriched for cells expressing CD4, CD25 and CD49f. Optionally, the population of cells is also enriched for cells expressing low or undetectable levels of CD127.

[0125] In one example, the population of cells is enriched for cells expressing CD4, CD25 and LSR. Optionally, the population of cells is also enriched for cells expressing low or undetectable levels of CD127.

[0126] In one example, the population of cells is enriched for cells expressing CD4, CD25 and PERP. Optionally, the population of cells is also enriched for cells expressing low or undetectable levels of CD127.

[0127] In one example, the population of cells is enriched for cells expressing CD4, CD25 and PKD1L3. Optionally, the population of cells is also enriched for cells expressing low or undetectable levels of CD127.

[0128] In one example, the population of cells is enriched for cells expressing CD4, CD25 and PTPRB. Optionally, the population of cells is also enriched for cells expressing low or undetectable levels of CD127.

### BRIEF DESCRIPTION OF THE DRAWINGS

[0129] FIG. 1A includes graphical representations showing (left-hand panel) isolation of Treg cells (upper ellipse) and Thelper cells (lower ellipse) using FACS analysis based on CD4 and CD25 expression levels; and (middle and right-hand panels) phenotypic analysis of expanded Treg cells showing that these cells maintained a Treg phenotype upon expansion, with between 80-90% of the expanded cells staining CD4⁺, CD25^{hi}, CD127^{-/dim} and FoxP3⁺.

[0130] FIG. 1B is a graphical representation showing that post expansion Treg cells retained function as they were able to robustly suppress the proliferation of CD4⁺CD25⁻ cells in vitro in an unmatched donor mixed leukocyte suppression assay.

[0131] FIG. 2 is a diagrammatic representation showing a heatmap of differentially expressed genes in resting or activated Treg vs Thelpers, some of which are listed in Table 7.

[0132] FIG. 3 includes two graphical representations showing the level of expression of six genes identified as differentially expressed in Treg cells using microarray analysis in FoxP3⁻CD25⁻ cells (non-Treg) and FoxP3⁺CD25⁺ cells (Treg). The left-hand panel shows the difference in gene expression expected from microarray analysis, and the right-hand panel shows the difference in gene expression observed using qPCR.

[0133] FIG. 4 is a series of volcano plots showing genes selected for inclusion in the heatmap (black dots) and the FDR estimates used for selection. FDR estimates for the first tier of genes are the upper line in each plot, and estimates for the second tier are the lower line in each plot. A log fold-change threshold of 0.7 was applied to second tier genes from each comparison, with the exception of CD25⁺ v CD25⁻ where a threshold of 0.5 was applied.

[0134] FIGS. 5A and 5B are graphical representations showing mean relative fold change (log fold change is depicted on the Y axis) in the level of expression of the genes indicated on the X-axis in stimulated Treg cells compared to stimulated Thelper cells. Results were obtained using low density array analysis as described herein. N=4. Error bars are indicative of the range in the data obtained.

[0135] FIGS. 5C and 5D are graphical representations showing mean relative fold change (log fold change is depicted on the Y axis) in the level of expression of the genes indicated on the X-axis in resting Treg cells compared to resting Thelper cells. Results were obtained using low density array analysis as described herein. N=4. Error bars are indicative of the range in the data obtained.

[0136] FIG. 6 is a series of graphical representations showing staining of freshly isolated adult CD4⁺ T cells with a polyclonal PI16 antibody (Abnova) together with CD25 or FoxP3. CD25 and PI16 staining is shown in the left hand panel with boxes indicating CD25 positive or negative or PI16 positive or negative. The right hand panel indicates FoxP3 expression levels for each boxed cell population. Results reveal that CD4⁺CD25⁺PI16⁺ cells show the highest FoxP3 expression levels whereas the CD4⁺CD25⁺PI16⁻ cells show a lower mean expression level. CD4⁺CD25⁻ cells are FoxP3⁻.

[0137] FIG. 7 is a series of graphical representations showing the expression of PI16 on induced Treg (iTreg). Cord blood CD4⁺CD25⁻ cells were expanded in the presence of recombinant human TGFβ-1 and CD3/CD28 T cell expander beads for a total of eight days before beads were removed and analyzed for CD25, FoxP3 and PI16 expression. The induced Treg expressed FoxP3 but are not positive for PI16 suggesting that PI16 may serve as a marker for natural but not induced Treg.

[0138] FIG. 8 is a series of graphical representations showing the proportion of PI16⁺ cells (identified with PI16 polyclonal antibody) that are in the population of cells isolated based on Treg cell surface markers (CD4⁺CD25^{bright}CD127⁻).

[0139] FIG. 9A is a series of graphical representations showing detection of T cell populations by an anti-PI16 polyclonal antibody (right hand panels). Results obtained with an Isotype control antibody are depicted in the left hand panels. In the top panels lymphocytes were labeled with antibodies to PI16 and to CD4 and the results show that PI16 is expressed in CD4⁺ lymphocytes. The panel second from the top shows results when CD4⁺ lymphocytes were labeled with antibodies against PI16 and CD25. These results indicate that a population of CD4⁺CD25^{hi/bright} cells (which include a Treg cell population) express PI16. The third panel from the top and the bottom panel show results of assays in which CD4+ lymphocytes were labeled with antibodies against PI16 and CD45RA or CD45R0. Results indicate that PI16 is expressed by memory T cells (CD45R0⁺CD45RA^{-/low}).

[0140] FIG. 9B shows results of assays in which a population of CD4⁺CD25^{hi/bright}PI16⁺ Treg cells and a population of CD4⁺CD25^{hi/bright}PI16⁻ Treg cells were labeled with antibodies against CD45R0 or CD45RA. Results indicate that PI16 is expressed by memory Treg cells (CD45R0⁺CD45RA^{-/low}).

[0141] FIG. 10 is a series of graphical representations showing expression of PI16 and FoxP3 expression in nTreg cells or Thelper cells.

[0142] The left hand panels show that when CD4⁺ cells were gated on the top 1% CD25⁺ cells (as depicted in Panel i)>85% of the FoxP3⁺ cells are PI16⁺ (as shown in Panel ii). CD25⁺ CD4 cells were also isolated according to the gates shown (Panel i) and then stimulated overnight with anti CD3/CD28 beads and stained for PI16 and FoxP3 expression. Sorted stimulated CD25⁺ cells stained robustly with the anti PI16 antibody, and this population contains >60% of the FoxP3⁺cells (Panel iii).

[0143] The right hand panels show that when CD4⁺ cells were gated on CD25⁻ (as depicted in Panel a) few FOXP3 cells are detected (as shown in Panel b). CD25⁻ CD4 cells were also isolated according to the gates shown (Panel a) and then stimulated overnight with anti CD3/CD28 beads and stained for PI16 and FoxP3 expression. The majority of the activated CD25− cells do not express PI16 or FoxP3 (Panel c). Representative data from n=3 donors.

### Key to Sequence Listing

[0144] SEQ ID NO: 1—Nucleotide coding sequence for human sphingomyelin phosphodiesterase 3 (SMPD3).
SEQ ID NO: 2—Amino acid sequence of human sphingomyelin phosphodiesterase 3 (SMPD3).
SEQ ID NO: 3—Nucleotide coding sequence for isoform alpha 1 of human chromosome 18 open reading frame 1 (C18orf1).
SEQ ID NO: 4—Amino acid sequence of isoform alpha 1 of human chromosome 18 open reading frame 1 (C18orf1).
SEQ ID NO: 5—Nucleotide coding sequence for isoform alpha 2 of human chromosome 18 open reading frame 1 (C18orf1).
SEQ ID NO: 6—Amino acid sequence for isoform alpha 2 of human chromosome 18 open reading frame 1 (C18orf1).
SEQ ID NO: 7—Nucleotide coding sequence for isoform beta 1 of human chromosome 18 open reading frame 1 (C18orf1).
SEQ ID NO: 8—Amino acid sequence for isoform beta 1 of human chromosome 18 open reading frame 1 (C18orf1).
SEQ ID NO: 9—Nucleotide coding sequence for isoform beta 2 of human chromosome 18 open reading frame 1 (C18orf1).
SEQ ID NO: 10—Amino acid sequence for isoform beta 2 of human chromosome 18 open reading frame 1 (C18orf1).

[0145] SEQ ID NO: 11—Nucleotide coding sequence for isoform gamma 1 of human chromosome 18 open reading frame 1 (C18orf1).

SEQ ID NO: 12—Amino acid sequence for isoform gamma 1 of human chromosome 18 open reading frame 1 (C18orf1).
SEQ ID NO: 13—Nucleotide coding sequence for isoform gamma 2 of human chromosome 18 open reading frame 1 (C18orf1).
SEQ ID NO: 14—Amino acid sequence for isoform gamma 2 of human chromosome 18 open reading frame 1 (C18orf1).
SEQ ID NO: 15—Nucleotide coding sequence for human interleukin 1 receptor, type I (IL1R1).
SEQ ID NO: 16—Amino acid sequence of human interleukin 1 receptor, type I (IL1R1).
SEQ ID NO: 17—Nucleotide coding sequence for isoform 1 of human CD79A.
SEQ ID NO: 18—Amino acid sequence for isoform 1 of human CD79A.
SEQ ID NO: 19—Nucleotide coding sequence for isoform 2 of human CD79A.
SEQ ID NO: 20—Amino acid sequence for isoform 2 of human CD79A.
SEQ ID NO: 21—Nucleotide coding sequence for isoform (a) of human protein tyrosine phosphatase, receptor type B (PTPRB).
SEQ ID NO: 22—Amino acid sequence for isoform (a) of human protein tyrosine phosphatase, receptor type B (PTPRB).
SEQ ID NO: 23—Nucleotide coding sequence for isoform (b) of human protein tyrosine phosphatase, receptor type B (PTPRB).
SEQ ID NO: 24—Amino acid sequence for isoform (b) of human protein tyrosine phosphatase, receptor type B (PTPRB).
SEQ ID NO: 25—Nucleotide coding sequence for human interferon gamma receptor 2 (IFNGR2).
SEQ ID NO: 26—Amino acid sequence of human interferon gamma receptor 2 (IFNGR2).
SEQ ID NO: 27—Nucleotide coding sequence for human peptidase inhibitor 16 (PI16).
SEQ ID NO: 28—Amino acid sequence of human peptidase inhibitor 16 (PI16).
SEQ ID NO: 29—Nucleotide coding sequence for isoform 1 of human CD33.
SEQ ID NO: 30—Amino acid sequence for isoform 1 of human CD33.
SEQ ID NO: 31—Nucleotide coding sequence for isoform 2 of human CD33.
SEQ ID NO: 32—Amino acid sequence for isoform 2 of human CD33.
SEQ ID NO: 33—Nucleotide coding sequence for human melanoma cell adhesion molecule (MCAM).
SEQ ID NO: 34—Amino acid sequence of human melanoma cell adhesion molecule (MCAM).
SEQ ID NO: 35—Nucleotide coding sequence for human integrin alpha M (ITGAM).
SEQ ID NO: 36—Amino acid sequence of human integrin alpha M (ITGAM).
SEQ ID NO: 37—Nucleotide coding sequence for human aquaporin 3 (AQP3).
SEQ ID NO: 38—Amino acid sequence of human aquaporin 3 (AQP3).
SEQ ID NO: 39—Nucleotide coding sequence for isoform A of human integrin alpha 6 (ITGA6).
SEQ ID NO: 40—Amino acid sequence for isoform A of human integrin alpha 6 (ITGA6).
SEQ ID NO: 41—Nucleotide coding sequence for isoform B of human integrin alpha 6 (ITGA6).
SEQ ID NO: 42—Amino acid sequence for isoform B of human integrin alpha 6 (ITGA6).
SEQ ID NO: 43—Nucleotide coding sequence for isoform 1 of human lipolysis stimulated lipoprotein receptor (LSR).
SEQ ID NO: 44-Amino acid sequence for isoform 1 of human lipolysis stimulated lipoprotein receptor (LSR).
SEQ ID NO: 45—Nucleotide coding sequence for isoform 2 of human lipolysis stimulated lipoprotein receptor (LSR).
SEQ ID NO: 46—Amino acid sequence for isoform 2 of human lipolysis stimulated lipoprotein receptor (LSR).
SEQ ID NO: 47—Nucleotide coding sequence for isoform 3 of human lipolysis stimulated lipoprotein receptor (LSR).
SEQ ID NO: 48—Amino acid sequence for isoform 3 of human lipolysis stimulated lipoprotein receptor (LSR).
SEQ ID NO: 49—Nucleotide coding sequence for isoform 1 of human carcinoembryonic antigen-related cell adhesion molecule 1 (CEACAM1).
SEQ ID NO: 50—Amino acid sequence for isoform 1 of human carcinoembryonic antigen-related cell adhesion molecule 1 (CEACAM1).
SEQ ID NO: 51—Nucleotide coding sequence for isoform 2 of human carcinoembryonic antigen-related cell adhesion molecule 1 (CEACAM1).
SEQ ID NO: 52—Amino acid sequence for isoform 2 of human carcinoembryonic antigen-related cell adhesion molecule 1 (CEACAM1).
SEQ ID NO: 53—Nucleotide coding sequence for human neural proliferation, differentiation and control 1 protein (NPDC1).
SEQ ID NO: 54—Amino acid sequence of human proliferation, differentiation and control 1 protein (NPDC1).
SEQ ID NO: 55—Nucleotide coding sequence for human EPH receptor B1 (EPHB1).
SEQ ID NO: 56-Amino acid sequence of human EPH receptor B1 (EPHB1).
SEQ ID NO: 57—Nucleotide coding sequence for human toll-like receptor 6 (TLR6).
SEQ ID NO: 58—Amino acid sequence of human toll-like receptor 6 (TLR6).
SEQ ID NO: 59—Nucleotide coding sequence for human plexin B2 (PLXNB2).
SEQ ID NO: 60—Amino acid sequence of human plexin B2 (PLXNB2).
SEQ ID NO: 61—Nucleotide coding sequence for human low density lipoprotein receptor-related protein 6 (LRP6).
SEQ ID NO: 62—Amino acid sequence of human low density lipoprotein receptor-related protein 6 (LRP6).
SEQ ID NO: 63—Nucleotide coding sequence for isoform 1 of human CD8B.
SEQ ID NO: 64—Amino acid sequence for isoform 1 of human CD8B.
SEQ ID NO: 65—Nucleotide coding sequence for isoform 2 of human CD8B.
SEQ ID NO: 66—Amino acid sequence for isoform 2 of human CD8B.
SEQ ID NO: 67—Nucleotide coding sequence for isoform 3 of human CD8B.
SEQ ID NO: 68—Amino acid sequence for isoform 3 of human CD8B.
SEQ ID NO: 69—Nucleotide coding sequence for isoform 4 of human CD8B.
SEQ ID NO: 70—Amino acid sequence for isoform 4 of human CD8B.
SEQ ID NO: 71—Nucleotide coding sequence for isoform 5 of human CD8B.
SEQ ID NO: 72—Amino acid sequence for isoform 5 of human CD8B.
SEQ ID NO: 73—Nucleotide coding sequence for human V-set and immunoglobulin domain containing 1 protein (VSIG1).
SEQ ID NO: 74—Amino acid sequence of human V-set and immunoglobulin domain containing 1 protein (VSIG1).
SEQ ID NO: 75—Nucleotide coding sequence for human p53 apoptosis effector related to PMP22 (PERP).
SEQ ID NO: 76—Amino acid sequence of human p53 apoptosis effector related to PMP22 (PERP).
SEQ ID NO: 77—Nucleotide coding sequence for isoform 1 of human CD79B.
SEQ ID NO: 78—Amino acid sequence for isoform 1 of human CD79B.
SEQ ID NO: 79—Nucleotide coding sequence for isoform 2 of human CD79B.
SEQ ID NO: 80—Amino acid sequence for isoform 2 of human CD79B.
SEQ ID NO: 81—Nucleotide coding sequence for isoform 3 of human CD79B.
SEQ ID NO: 82—Amino acid sequence for isoform 3 of human CD79B.
SEQ ID NO: 83—Nucleotide coding sequence for human polycystic kidney disease 1-like 3 (PKD1L3).
SEQ ID NO: 84—Amino acid sequence for human polycystic kidney disease 1-like 3 (PKD1L3).
SEQ ID NO: 85—Nucleotide coding sequence for human T cell immunoreceptor with Ig and ITIM domains (TIGIT).
SEQ ID NO: 86—Amino acid sequence for human T cell immunoreceptor with Ig and ITIM domains (TIGIT).
SEQ ID NO: 87—Nucleotide coding sequence for human ST8 alpha-N-acetyl-neuraminide alpha-2,8-sialyltransferase 6 (ST8SIA6).
SEQ ID NO: 88—Amino acid sequence for human ST8 alpha-N-acetyl-neuraminide alpha-2,8-sialyltransferase 6 (ST8SIA6).
SEQ ID NO: 89—Nucleotide coding sequence for isoform 1 of human chromosome 6 open reading frame 105 (C6orf105).
SEQ ID NO: 90—Amino acid sequence for isoform 1 of human chromosome 6 open reading frame 105 (C6orf105).
SEQ ID NO: 91—Nucleotide coding sequence for isoform 2 of human chromosome 6 open reading frame 105 (C6orf105).
SEQ ID NO: 92—Amino acid sequence for isoform 2 of human chromosome 6 open reading frame 105 (C6orf105).
SEQ ID NO: 93—Nucleotide coding sequence for human tetraspanin 15 (TSPAN15).
SEQ ID NO: 94—Amino acid sequence for human tetraspanin 15 (TSPAN15).
SEQ ID NO: 95—Nucleotide coding sequence for human NIPA-like domain containing 2 (NPAL2).
SEQ ID NO: 96—Amino acid sequence for human NIPA-like domain containing 2 (NPAL2).
SEQ ID NO: 97—Nucleotide coding sequence for human FRAS1 related extracellular matrix 3 (FREM3).
SEQ ID NO: 98—Amino acid sequence for human FRAS1 related extracellular matrix 3 (FREM3).
SEQ ID NO: 99—Nucleotide coding sequence for human WDFY family member 4 (WDFY4).
SEQ ID NO: 100—Amino acid sequence for human WDFY family member 4 (WDFY4).
SEQ ID NO: 101—Nucleotide coding sequence for human Fc fragment of IgE, high affinity I, receptor for; gamma polypeptide (FCER1G).

[0146] SEQ ID NO: 102—Amino acid sequence for human Fc fragment of IgE, high affinity I, receptor for; gamma polypeptide (FCER1G).

SEQ ID NO: 103—Nucleotide coding sequence for variant 1 of human transmembrane protein 169 (TMEM169).
SEQ ID NO: 104—Amino acid sequence for variant 1 of human transmembrane protein 169 (TMEM169).
SEQ ID NO: 105—Nucleotide coding sequence for variant 2 of human transmembrane protein 169 (TMEM169).
SEQ ID NO: 106—Amino acid sequence for variant 2 of human transmembrane protein 169 (TMEM169).
SEQ ID NO: 107—Nucleotide coding sequence for variant 3 of human transmembrane protein 169 (TMEM169).
SEQ ID NO: 108—Amino acid sequence for variant 3 of human transmembrane protein 169 (TMEM169).
SEQ ID NO: 109—Nucleotide coding sequence for variant 4 of human transmembrane protein 169 (TMEM169).

[0147] SEQ ID NO: 110—Amino acid sequence for variant 4 of human transmembrane protein 169 (TMEM169).

SEQ ID NO: 111—Nucleotide coding sequence for human mucolipin 2 (MCOLN2).
SEQ ID NO: 112—Amino acid sequence for human mucolipin 2 (MCOLN2).
SEQ ID NO: 113—Nucleotide coding sequence for human C-type lectin-like 1 (CLECL 1).
SEQ ID NO: 114—Amino acid sequence for human C-type lectin-like 1 (CLECL1).
SEQ ID NO: 115—Nucleotide coding sequence for human lysophosphatidylcholine acyltransferase 2 (LPCAT2).
SEQ ID NO: 116—Amino acid sequence for human lysophosphatidylcholine acyltransferase 2 (LPCAT2).
SEQ ID NO: 117—Nucleotide coding sequence for variant 1 of human leucine rich repeat neuronal 3 (LRRN3).
SEQ ID NO: 118—Amino acid sequence for variant 1 of human leucine rich repeat neuronal 3 (LRRN3).

[0148] SEQ ID NO: 119—Nucleotide coding sequence for variant 2 of human leucine rich repeat neuronal 3 (LRRN3).

SEQ ID NO: 120—Amino acid sequence for variant 2 of human leucine rich repeat neuronal 3 (LRRN3).
SEQ ID NO: 121—Nucleotide coding sequence for variant 3 of human leucine rich repeat neuronal 3 (LRRN3).
SEQ ID NO: 122—Amino acid sequence for variant 3 of human leucine rich repeat neuronal 3 (LRRN3).
SEQ ID NO: 123—Nucleotide coding sequence for human syntaxin 3 (STX3).
SEQ ID NO: 124—Amino acid sequence for human syntaxin 3 (STX3).

[0149] SEQ ID NO: 125—Nucleotide coding sequence for human HEG homolog 1 (HEG1).

SEQ ID NO: 126—Amino acid sequence for human HEG homolog 1 (HEG1). SEQ ID NO: 127—Nucleotide coding sequence for human transmembrane protein 200A, KIAA1913 (TMEM200A).
SEQ ID NO: 128—Amino acid sequence for human transmembrane protein 200A, KIAA1913 (TMEM200A).

[0150] SEQ ID NO: 129—Nucleotide coding sequence for human G protein-coupled receptor 174 (GPR174).

SEQ ID NO: 130—Amino acid sequence for human G protein-coupled receptor 174 (GPR174).
SEQ ID NO: 131—Nucleotide coding sequence for human transmembrane protein 71 (TMEM71).
SEQ ID NO: 132—Amino acid sequence for human transmembrane protein 71 (TMEM71).
SEQ ID NO: 133—Nucleotide coding sequence for human ATPase, class V, type 10D (ATP10D).
SEQ ID NO: 134—Amino acid sequence for human ATPase, class V, type 10D (ATP10D).
SEQ ID NO: 135—Nucleotide coding sequence for human immediate early response 3 (IER3).
SEQ ID NO: 136—Amino acid sequence for human immediate early response 3 (IER3).
SEQ ID NO: 137—Nucleotide coding sequence for human lymphoid-restricted membrane protein (LRMP).
SEQ ID NO: 138—Amino acid sequence for human lymphoid-restricted membrane protein (LRMP).

[0151] SEQ ID NO: 139—Nucleotide coding sequence for human prostaglandin E receptor 4, subtype EP4 (PTGER4).

SEQ ID NO: 140—Amino acid sequence for human prostaglandin E receptor 4, subtype EP4 (PTGER4).
SEQ ID NO: 141—Nucleotide coding sequence for human cysteinyl leukotriene receptor 1 (CYSLTR1).
SEQ ID NO: 142—Amino acid sequence of human cysteinyl leukotriene receptor 1 (CYSLTR1).
SEQ ID NO: 143—Nucleotide coding sequence for human ATPase, class I, type 8B, member 4 (ATP8B4).
SEQ ID NO: 144—Amino acid sequence of human ATPase, class I, type 8B, member 4 (ATP8B4).
SEQ ID NO: 145—Nucleotide coding sequence for human integrin alpha 2 (ITGA2),
SEQ ID NO: 146—Amino acid sequence of human integrin alpha 2 (ITGA2).
SEQ ID NO: 147—Nucleotide coding sequence for human CD300A.
SEQ ID NO: 148—Amino acid sequence of human CD300A.
SEQ ID NO: 149—Nucleotide coding sequence for human integrin alpha 1 (ITGA1).
SEQ ID NO: 150—Amino acid sequence of human integrin alpha 1 (ITGA1).
SEQ ID NO: 151—Nucleotide coding sequence for human CD274.
SEQ ID NO: 152—Amino acid sequence of human CD274.
SEQ ID NO: 153—Nucleotide coding sequence for human CD9.
SEQ ID NO: 154—Amino acid sequence of human CD9.
SEQ ID NO: 155—Nucleotide coding sequence for human semaphorin 3A (SEMA3A).
SEQ ID NO: 156—Amino acid sequence of human semaphorin 3A (SEMA3A).
SEQ ID NO: 157—Nucleotide coding sequence for isoform 1 of human neuropilin 2 (NRP2).
SEQ ID NO: 158—Amino acid sequence for isoform 1 of human neuropilin 2 (NRP2).
SEQ ID NO: 159—Nucleotide coding sequence for isoform 2 of human neuropilin 2 (NRP2).
SEQ ID NO: 160—Amino acid sequence for isoform 2 of human neuropilin 2 (NRP2).

[0152] SEQ ID NO: 161—Nucleotide coding sequence for isoform 3 of human neuropilin 2 (NRP2).

SEQ ID NO: 162—Amino acid sequence for isoform 3 of human neuropilin 2 (NRP2).
SEQ ID NO: 163—Nucleotide coding sequence for isoform 4 of human neuropilin 2 (NRP2).
SEQ ID NO: 164—Amino acid sequence for isoform 4 of human neuropilin 2 (NRP2).
SEQ ID NO: 165—Nucleotide coding sequence for isoform 5 of human neuropilin 2 (NRP2).
SEQ ID NO: 166—Amino acid sequence for isoform 5 of human neuropilin 2 (NRP2).
SEQ ID NO: 167—Nucleotide coding sequence for isoform 6 of human neuropilin 2 (NRP2).
SEQ ID NO: 168—Amino acid sequence for isoform 6 of human neuropilin 2 (NRP2).
SEQ ID NO: 169—Nucleotide coding sequence for human G protein-coupled receptor 183 (GPR183).
SEQ ID NO: 170—Amino acid sequence of human G protein-coupled receptor 183 (GPR183).
SEQ ID NO: 171—Nucleotide coding sequence for isoform 1 of human cytochrome b reductase 1 (CYBRD1).
SEQ ID NO: 172—Amino acid sequence for isoform 1 of human cytochrome b reductase 1 (CYBRD1).
SEQ ID NO: 173—Nucleotide coding sequence for isoform 2 of human cytochrome b reductase 1 (CYBRD1).
SEQ ID NO: 174—Amino acid sequence for isoform 2 of human cytochrome b reductase 1 (CYBRD1).
SEQ ID NO: 175—Nucleotide coding sequence for human activin A receptor, type IIA (ACVR2A).
SEQ ID NO: 176—Amino acid sequence of human activin A receptor, type IIA (ACVR2A).
SEQ ID NO: 177—Nucleotide coding sequence for human sortilin 1 (SORT1).
SEQ ID NO: 178—Amino acid sequence of human sortilin 1 (SORT1).
SEQ ID NO: 179—Nucleotide coding sequence for isoform a of human CD200 receptor 1 (CD200R1).
SEQ ID NO: 180—Amino acid sequence for isoform a of human CD200 receptor 1 (CD200R1).
SEQ ID NO: 181—Nucleotide coding sequence for isoform b of human CD200 receptor 1 (CD200R1).
SEQ ID NO: 182—Amino acid sequence for isoform b of human CD200 receptor 1 (CD200R1).
SEQ ID NO: 183—Nucleotide coding sequence for isoform c of human CD200 receptor 1 (CD200R1).
SEQ ID NO: 184—Amino acid sequence for isoform c of human CD200 receptor 1 (CD200R1).
SEQ ID NO: 185—Nucleotide coding sequence for isoform d of human CD200 receptor 1 (CD200R1).
SEQ ID NO: 186—Amino acid sequence for isoform d of human CD200 receptor 1 (CD200R1).
SEQ ID NO: 187—Nucleotide coding sequence for human mucolipin 3 (MCOLN3).
SEQ ID NO: 188—Amino acid sequence of human mucolipin 3 (MCOLN3).
SEQ ID NO: 189—Nucleotide coding sequence for human tetraspanin 2 (TSPAN2).
SEQ ID NO: 190—Amino acid sequence of human tetraspanin 2 (TSPAN2).
SEQ ID NO: 191—Nucleotide coding sequence for human epithelial mitogen homolog (EPGN).
SEQ ID NO: 192—Amino acid sequence of human epithelial mitogen homolog (EPGN).
SEQ ID NO: 193—Nucleotide coding sequence for isoform 1 of human phosphatidic acid phosphatase type 2A (PPAP2A).
SEQ ID NO: 194—Amino acid sequence for isoform 1 of human phosphatidic acid phosphatase type 2A (PPAP2A).
SEQ ID NO: 195—Nucleotide coding sequence for isoform 2 of human phosphatidic acid phosphatase type 2A (PPAP2A).
SEQ ID NO: 196—Amino acid sequence for isoform 2 of human phosphatidic acid phosphatase type 2A (PPAP2A).
SEQ ID NO: 197—Nucleotide coding sequence for isoform 1 of human adhesion molecule, interacts with CXADR antigen 1 (AMICA1).
SEQ ID NO: 198—Amino acid sequence for isoform 1 of human adhesion molecule, interacts with CXADR antigen 1 (AMICA1).
SEQ ID NO: 199—Nucleotide coding sequence for isoform 2 of human adhesion molecule, interacts with CXADR antigen 1 (AMICA1).
SEQ ID NO: 200—Amino acid sequence for isoform 2 of human adhesion molecule, interacts with CXADR antigen 1 (AMICA1).
SEQ ID NO: 201—Nucleotide coding sequence for isoform 1 of human prostaglandin E receptor 3 (PTGER3).
SEQ ID NO: 202—Amino acid sequence for isoform 1 of human prostaglandin E receptor 3 (PTGER3).
SEQ ID NO: 203—Nucleotide coding sequence for isoform 2 of human prostaglandin E receptor 3 (PTGER3).
SEQ ID NO: 204—Amino acid sequence for isoform 2 of human prostaglandin E receptor 3 (PTGER3).
SEQ ID NO: 205—Nucleotide coding sequence for isoform 3 of human prostaglandin E receptor 3 (PTGER3).
SEQ ID NO: 206—Amino acid sequence for isoform 3 of human prostaglandin E receptor 3 (PTGER3).
SEQ ID NO: 207—Nucleotide coding sequence for isoform 4 of human prostaglandin E receptor 3 (PTGER3).
SEQ ID NO: 208—Amino acid sequence for isoform 4 of human prostaglandin E receptor 3 (PTGER3).
SEQ ID NO: 209—Nucleotide coding sequence for isoform 5 of human prostaglandin E receptor 3 (PTGER3).
SEQ ID NO: 210—Amino acid sequence for isoform 5 of human prostaglandin E receptor 3 (PTGER3).
SEQ ID NO: 211—Nucleotide coding sequence for isoform 6 of human prostaglandin E receptor 3 (PTGER3).
SEQ ID NO: 212—Amino acid sequence for isoform 6 of human prostaglandin E receptor 3 (PTGER3).
SEQ ID NO: 213—Nucleotide coding sequence for isoform 7 of human prostaglandin E receptor 3 (PTGER3).
SEQ ID NO: 214—Amino acid sequence for isoform 7 of human prostaglandin E receptor 3 (PTGER3).
SEQ ID NO: 215—Nucleotide coding sequence for isoform 8 of human prostaglandin E receptor 3 (PTGER3).
SEQ ID NO: 216—Amino acid sequence for isoform 8 of human prostaglandin E receptor 3 (PTGER3).
SEQ ID NO: 217—Nucleotide coding sequence for isoform 9 of human prostaglandin E receptor 3 (PTGER3).
SEQ ID NO: 218—Amino acid sequence for isoform 9 of human prostaglandin E receptor 3 (PTGER3).
SEQ ID NO: 219—Nucleotide coding sequence for isoform 10 of human prostaglandin E receptor 3 (PTGER3).
SEQ ID NO: 220—Amino acid sequence for isoform 10 of human prostaglandin E receptor 3 (PTGER3).
SEQ ID NO: 221—Nucleotide coding sequence for isoform a of human protein tyrosine phosphatase, receptor type, K (PTPRK).
SEQ ID NO: 222—Amino acid sequence for isoform a of human protein tyrosine phosphatase, receptor type, K (PTPRK).
SEQ ID NO: 223—Nucleotide coding sequence for isoform b of human protein tyrosine phosphatase, receptor type, K (PTPRK).
SEQ ID NO: 224—Amino acid sequence for isoform b of human protein tyrosine phosphatase, receptor type, K (PTPRK).
SEQ ID NO: 225—Nucleotide coding sequence for isoform 1 of human CD82.
SEQ ID NO: 226—Amino acid sequence for isoform 1 of human CD82.
SEQ ID NO: 227—Nucleotide coding sequence for isoform 2 of human CD82.
SEQ ID NO: 228—Amino acid sequence for isoform 2 of human CD82.
SEQ ID NO: 229—Nucleotide coding sequence for human phospholipid scramblase 1 (PLSCR1).
SEQ ID NO: 230—Amino acid sequence of human phospholipid scramblase 1 (PLSCR1).
SEQ ID NO: 231—Nucleotide coding sequence for human LAG1 homolog, ceramide synthase 6 (LASS6).
SEQ ID NO: 232—Amino acid sequence of human LAG1 homolog, ceramide synthase 6 (LASS6).
SEQ ID NO: 233—Nucleotide coding sequence for human G protein-coupled receptor 15 (GPR15).
SEQ ID NO: 234—Amino acid sequence of human G protein-coupled receptor 15 (GPR15).
SEQ ID NO: 235—Nucleotide coding sequence for human GLI pathogenesis-related 1 protein (GLIPR1).
SEQ ID NO: 236—Amino acid sequence of human GLI pathogenesis-related 1 protein (GLIPR1).
SEQ ID NO: 237—Nucleotide coding sequence for human cytotoxic and regulatory T cell molecule (CRTAM).
SEQ ID NO: 238—Amino acid sequence of human cytotoxic and regulatory T cell molecule (CRTAM).
SEQ ID NO: 239—Nucleotide coding sequence for human C-type lectin domain family 2, member B (CLEC2B).
SEQ ID NO: 240—Amino acid sequence of human C-type lectin domain family 2, member B (CLEC2B).
SEQ ID NO: 241—Nucleotide coding sequence for isoform 1 of human ectonucleotide pyrophosphatase/phosphodiesterase 2 (ENPP2).
SEQ ID NO: 242—Amino acid sequence for isoform 1 of human ectonucleotide pyrophosphatase/phosphodiesterase 2 (ENPP2).
SEQ ID NO: 243—Nucleotide coding sequence for isoform 2 of human ectonucleotide pyrophosphatase/phosphodiesterase 2 (ENPP2).
SEQ ID NO: 244—Amino acid sequence for isoform 2 of human ectonucleotide pyrophosphatase/phosphodiesterase 2 (ENPP2).
SEQ ID NO: 245—Nucleotide coding sequence for isoform 3 of human ectonucleotide pyrophosphatase/phosphodiesterase 2 (ENPP2).
SEQ ID NO: 246—Amino acid sequence for isoform 3 of human ectonucleotide pyrophosphatase/phosphodiesterase 2 (ENPP2).
SEQ ID NO: 247—Nucleotide coding sequence for human SLAM family member 6 (SLAMF6).
SEQ ID NO: 248—Amino acid sequence of human SLAM family member 6 (SLAMF6).
SEQ ID NO: 249—Nucleotide coding sequence for human core 1 synthase, glycoprotein-N-acetylgalactosamine 3-beta-galactosyltransferase, 1 (C1GALT1).
SEQ ID NO: 250—Amino acid sequence of human core 1 synthase, glycoprotein-N-acetylgalactosamine 3-beta-galactosyltransferase, 1 (C1GALT1).
SEQ ID NO: 251—Nucleotide coding sequence for human adhesion molecule with Ig-like domain 2 (AMIGO2).
SEQ ID NO: 252—Amino acid sequence of human adhesion molecule with Ig-like domain 2 (AMIGO2).
SEQ ID NO: 253—Nucleotide coding sequence for human cornichon homolog 4 (CNIH4).
SEQ ID NO: 254—Amino acid sequence of human cornichon homolog 4 (CNIH4).
SEQ ID NO: 255—Nucleotide coding sequence for human poliovirus receptor-related 3 (PVRL3).
SEQ ID NO: 256—Amino acid sequence of human poliovirus receptor-related 3 (PVRL3).
SEQ ID NO: 257—Nucleotide coding sequence for human G protein-coupled receptor 65 (GPR65).
SEQ ID NO: 258—Amino acid sequence of human G protein-coupled receptor 65 (GPR65).
SEQ ID NO: 259—Nucleotide coding sequence for isoform a of human sushi domain containing 4 (SUSD4).
SEQ ID NO: 260—Amino acid sequence for isoform a of human sushi domain containing 4 (SUSD4).
SEQ ID NO: 261—Nucleotide coding sequence for isoform b of human sushi domain containing 4 (SUSD4).
SEQ ID NO: 262—Amino acid sequence for isoform b of human sushi domain containing 4 (SUSD4).
SEQ ID NO: 263—Nucleotide coding sequence for human Ra1 GEF with PH domain and SH3 binding motif 2 (RALGPS2).
SEQ ID NO: 264—Amino acid sequence of human Ra1 GEF with PH domain and SH3 binding motif 2 (RALGPS2).
SEQ ID NO: 265—Nucleotide coding sequence for human interleukin 18 receptor accessory protein (IL18RAP).
SEQ ID NO: 266—Amino acid sequence of human interleukin 18 receptor accessory protein (IL18RAP).
SEQ ID NO: 267—Nucleotide coding sequence for human RGM domain family member B.
SEQ ID NO: 268—Amino acid sequence of human RGM domain family member B.
SEQ ID NO: 269—Nucleotide coding sequence for human ATPase, H+ transporting, lysosomal V0 subunit a1 (ATP6V0A1) isoform a.
SEQ ID NO: 270—Amino acid sequence of human ATPase, H+ transporting, lysosomal V0 subunit a1 (ATP6V0A1) isoform a.
SEQ ID NO: 271—Nucleotide coding sequence for human ATPase, H+ transporting, lysosomal V0 subunit a1 (ATP6VOA1) isoform b.
SEQ ID NO: 272—Amino acid sequence of human ATPase, H+ transporting, lysosomal V0 subunit a1 (ATP6VOA1) isoform b.
SEQ ID NO: 273—Nucleotide coding sequence for human ATPase, H+ transporting, lysosomal V0 subunit a1 (ATP6V0A1) isoform c.
SEQ ID NO: 274—Amino acid sequence of human ATPase, H+ transporting, lysosomal V0 subunit a1 (ATP6V0A1) isoform c.
SEQ ID NO: 275—Nucleotide coding sequence for human interleukin 6 receptor (IL6R) isoform 1.
SEQ ID NO: 276—Amino acid sequence of human interleukin 6 receptor (IL6R) isoform 1.
SEQ ID NO: 277—Nucleotide coding sequence for human interleukin 6 receptor (IL6R) isoform 2.
SEQ ID NO: 278—Amino acid sequence of human interleukin 6 receptor (IL6R) isoform 2.
SEQ ID NO: 279—Nucleotide coding sequence for human natural killer cell group 7 sequence (NKG7).
SEQ ID NO: 280—Amino acid sequence of human natural killer cell group 7 sequence (NKG7).
SEQ ID NO: 281—Nucleotide coding sequence for human CD4.
SEQ ID NO: 282—Amino acid sequence of human CD4.
SEQ ID NO: 283—Nucleotide coding sequence for human CD25.
SEQ ID NO: 284—Amino acid sequence of human CD25.
SEQ ID NO: 285—Nucleotide coding sequence for human FoxP3.
SEQ ID NO: 286—Amino acid sequence of human FoxP3.

### SELECTED DEFINITIONS

[0153] The term “and/or”, e.g., “X and/or Y” shall be understood to mean either “X and Y” or “X or Y” and shall be taken to provide explicit support for both meanings or for either meaning.

[0154] Throughout this specification the word “comprise”, or variations such as “comprises” or “comprising”, will be understood to imply the inclusion of a stated element, integer or step, or group of elements, integers or steps, but not the exclusion of any other element, integer or step, or group of elements, integers or steps.

[0155] As used herein, the term “effective amount” shall be taken to mean a sufficient quantity of a compound to bind to the target protein in vivo and, preferably, to reduce or inhibit or prevent Treg cell activity in vivo, compared to the same level in a subject or cell, tissue or organ thereof prior to administration and/or compared to a subject or cell, tissue or organ thereof from a subject of the same species to which the compound has not been administered. Preferably, the term “effective amount” means a sufficient quantity of the compound to reduce, prevent, or ameliorate a Treg-mediated condition and/or to kill Treg cells in a subject. The skilled artisan will be aware that such an amount will vary depending on, for example, the specific compounds administered and/or the particular subject and/or the type or severity or level of disease. Accordingly, this term is not to be construed to limit the invention to a specific quantity, e.g., weight or amount of compound(s) rather the present invention encompasses any amount of the compound(s) sufficient to achieve the stated result in a subject.

[0156] As used herein, the term “therapeutically effective amount” shall be taken to mean a sufficient quantity of a compound to reduce or inhibit one or more symptoms of a clinical disease associated with or caused by Treg cells to a level that is below that observed and accepted as clinically diagnostic or clinically characteristic of that disease. The skilled artisan will be aware that such an amount will vary depending on, for example, the specific compound(s) administered and/or the particular subject and/or the type or severity or level of disease. Accordingly, this term is not to be construed to limit the invention to a specific quantity, e.g., weight or amount of compound(s), rather the present invention encompasses any amount of the compound(s) sufficient to achieve the stated result in a subject.

[0157] As used herein, the term “prophylactically effective amount” shall be taken to mean a sufficient quantity of a compound to prevent or inhibit or delay the onset of one or more detectable symptoms of a clinical condition associated with or caused by Treg cells. The skilled artisan will be aware that such an amount will vary depending on, for example, the specific compound(s) administered and/or the particular subject and/or the type or severity or level of disease and/or predisposition (genetic or otherwise) to the disease. Accordingly, this term is not to be construed to limit the invention to a specific quantity, e.g., weight or amount of compound(s), rather the present invention encompasses any amount of the compound(s) sufficient to achieve the stated result in a subject.

[0158] As used herein, the term “immune response” refers to the concerted action of lymphocytes, antigen presenting cells, phagocytic cells, granulocytes, and soluble macromolecules produced by the above cells or the liver (including antibodies, cytokines, and complement) that results in selective damage to, destruction of, or elimination from the body of a subject of cancerous cells, metastatic tumor cells, malignant melanoma, invading pathogens, cells or tissues infected with pathogens, or, in cases of autoimmunity or pathological inflammation, normal cells or tissues of a subject.

[0159] As used herein, the term “specifically binds” shall be taken to mean a compound reacts or associates more frequently, more rapidly, with greater duration and/or with greater affinity with a particular cell or substance than it does with alternative cells or substances. For example, a compound that specifically binds to a target protein is a compound that binds that protein or an epitope or immunogenic fragment thereof with greater affinity, avidity, more readily, and/or with greater duration than it binds to unrelated protein and/or epitopes or immunogenic fragments thereof. It is also understood by reading this definition that, for example, a compound that specifically binds to a first target may or may not specifically bind to a second target. As such, “specific binding” does not necessarily require exclusive binding or non-detectable binding of another molecule, this is encompassed by the term “selective binding”. Generally, but not necessarily, reference to binding means specific binding.

[0160] As used herein, the terms “treating”, “treat” or “treatment” include administering a therapeutically effective amount of a compound described herein sufficient to reduce or eliminate at least one symptom of a specified disease or condition.

[0161] As used herein, the terms “preventing”, “prevent” or “prevention” include administering a therapeutically effective amount of an inhibitor(s) and/or agent(s) described herein sufficient to stop or hinder the development of at least one symptom of a specified disease or condition.

[0162] As used herein, the term “Treg” or “regulatory T cell” shall be understood to mean a T cell expresses at least CD4 and/or CD25 that is capable of reducing or suppressing the activity of a T cell other than a Treg cell and/or killing a T cell. This term includes T cells which produce low levels of IL-2, IL-4, IL-5, and IL-1, and acts to suppress activation of the immune system. Regulatory T cells actively suppress the proliferation and cytokine production of Th1, Th2, or naive T cells which have been stimulated in culture with an activating signal (e.g., antigen and antigen presenting cells or with a signal that mimics antigen in the context of MHC, e.g., anti-CD3 antibody, plus anti-CD28 antibody). In one example, a Treg cell expresses FoxP3 (however, it not a requirement that expression of FoxP3 is detected to determine whether or not a cell is a Treg cell). This term also encompasses mutant forms of Treg cells, e.g., a cell which is derived from Treg cells but exhibits at least one difference at the phenotypic or functional or structural level. For example, the mutant or variant may have been altered to express a therapeutic protein or a protein that alters or enhances Treg cell function. Such changes can occur either spontaneously or as a result of a directed manipulation, such as would occur if a cell was deliberately transformed (for example, in order to effect the creation of a cell line) or transfected.

[0163] As used herein, the term “enriched” or “enrich” in the context of a cell population shall be taken to mean that the number or percentage of Treg cells is greater than the number or percentage in a naturally occurring cell population. For example, a population enriched in Treg cells is made up of at least about 0.02% of said cells, or at least about 0.05% of said cells or at least about 0.1% of said cells or at least about 0.2% of said cells or at least about 0.5% of said cells or at least about 0.5% of said cells or at least about 0.8% of said cells or at least about 1% of said cells or at least about 2% of said cells or at least about 3% of said cells or at least about 4% of said cells or at least about 5% of said cells or at least about 10% of said cells or at least about 15% of said cells or at least about 20% of said cells or at least about 25% of said cells or at least about 30% of said cells or at least about 40% of said cells or at least about 50% of said cells or at least about 60% of said cells or at least about 70% of said cells or at least about 80% of said cells or at least about 85% of said cells or at least about 90% of said cells or at least about 95% of said cells or at least about 97% of said cells or at least about 98% of said cells or at least about 99% of said cells.

[0164] As used herein, the term “non-Treg cell” or “cell other than a Treg cell” includes T cells which function to eliminate antigen (e.g., by producing cytokines which modulate the activation of other cells or by cytotoxic activity). This term includes Thelper cells (e.g., Th1 and Th2 cells) and cytotoxic T cells. In this respect, Thelper cells preferably express CD4 and express low or undetectable levels of CD25. CTL cells preferably express CD8 and low or undetectable levels of CD4. Preferably, a non-Treg cell does not express both CD4 and CD25. Preferably, a non-Treg cell does not express FoxP3 (however, it not a requirement that expression of FoxP3 is detected to determine whether or not a cell is a Treg cell).

[0165] The term “Treg-associated condition” shall be taken to encompass any disease or disorder or state in which modulation of Treg numbers and/or activity may provide a beneficial effect. This term encompasses conditions associated with regulatory T cell-mediated suppression of a subject's immune system, e.g., conditions associated with or caused by an excessive immune response (e.g., by a Thelper cell or a CTL or other cell regulated by one or more T cells). Accordingly, this term encompasses inflammatory conditions and/or autoimmune conditions. Exemplary Treg-associated conditions include, an inflammatory disorder of the nervous system (e.g., multiple sclerosis), or a mucosal inflammatory disease (e.g., inflammatory bowel disease, asthma or tonsillitis), or an inflammatory skin disease (e.g., dermatitis, psoriasis or contact hypersensitivity) or autoimmune arthritis (e.g., rheumatoid arthritis). Preferred Treg associated conditions include rheumatoid arthritis. In one embodiment, the inflammatory disorder is an allergic inflammatory disorder. An immune response against a graft or graft versus host disease or host versus graft disease is also a Treg-associated condition. This term also includes cancer, e.g., in which Treg cells suppress the activity of immune cells against cancerous cells, thereby permitting the disease to develop.

[0166] As used herein, the term “subject” shall be taken to mean any subject comprising Treg cells, preferably a mammal. Exemplary subjects include but are not limited to human, primate, livestock (e.g. sheep, cow, horse, donkey, pig), companion animals (e.g. dogs, cats), laboratory test animals (e.g. mice, rabbits, rats, guinea pigs, hamsters), captive wild animal (e.g. fox, deer). Preferably the mammal is a human or primate. Most preferably the mammal is a human.

[0167] The term “sample” shall be taken to encompass the recited sample (e.g., a blood sample) and any fraction thereof (e.g., plasma, serum or buffy coat) or cells derived therefrom (e.g., peripheral blood mononuclear cells) or process forms thereof.

### General

[0168] This specification contains nucleotide and amino acid sequence information prepared using PatentIn Version 3.5. Each nucleotide sequence is identified in the sequence listing by the numeric indicator <210> followed by the sequence identifier (e.g. <210>1, <210>2, <210>3, etc). The length and type of sequence (DNA, protein (PRT), etc), and source organism for each nucleotide sequence, are indicated by information provided in the numeric indicator fields <211>, <212> and <213>, respectively. Nucleotide sequences referred to in the specification are defined by the term “SEQ ID NO:”, followed by the sequence identifier (e.g. SEQ ID NO: 1 refers to the sequence in the sequence listing designated as <400>1).

[0169] Throughout this specification, unless specifically stated otherwise or the context requires otherwise, reference to a single step, composition of matter, group of steps or group of compositions of matter shall be taken to encompass one and a plurality (i.e. one or more) of those steps, compositions of matter, groups of steps or group of compositions of matter.

[0170] Those skilled in the art will appreciate that the invention described herein is susceptible to variations and modifications other than those specifically described. It is to be understood that the invention includes all such variations and modifications. The invention also includes all of the steps, features, compositions and compounds referred to or indicated in this specification, individually or collectively, and any and all combinations or any two or more of said steps or features.

[0171] The present invention is not to be limited in scope by the specific embodiments described herein, which are intended for the purpose of exemplification only. Functionally-equivalent products, compositions and methods are clearly within the scope of the invention, as described herein.

[0172] Any embodiment herein shall be taken to apply mutatis mutandis to any other embodiment unless specifically stated otherwise.

[0173] Unless specifically defined otherwise, all technical and scientific terms used herein shall be taken to have the same meaning as commonly understood by one of ordinary skill in the art (for example, in cell culture, molecular genetics, immunology, immunohistochemistry, protein chemistry, and biochemistry).

[0174] Unless otherwise indicated, the recombinant protein, cell culture, and immunological techniques utilized in the present invention are standard procedures, well known to those skilled in the art. Such techniques are described and explained throughout the literature in sources such as, Perbal, (1984), Sambrook et al., (1989), Brown (1991), Glover and Hames (1995 and 1996), Ausubel et al., (1988, including all updates until present), Harlow and Lane (1988), Coligan et al., (including all updates until present) and Zola (1987).

### DETAILED DESCRIPTION OF THE PREFERRED EMBODIMENTS

### Treg Markers and Encoding Nucleic Acids

[0175] Preferred Treg protein markers and nucleic acids encoding same are discussed herein and/or set forth in any one or more of Tables 2-6. In this respect, the present invention encompasses nucleic acids or proteins having a sequence at least about 70% identical to a nucleic acid or protein recited in any one or more of Tables 2-6.

TABLE 2
Protein biomarkers and nucleic acids encoding same that are upregulated on/in Treg cells.

| | Entrez | | |
|---|---|---|---|
| | Accession | Nucleotide | Amino acid |
| Gene name | Number | SEQ ID NO: | SEQ ID NO: |
| Peptidase inhibitor 16 (PI16) | 221476 | 27 | 28 |
| Interleukin 1 receptor, type I (IL1R1) (CD121) | 3554 | 15 | 16 |
| Polycystic kidney disease 1-like 3 (PKD1L3) | 342372 | 83 | 84 |
| Isoform (a) of protein tyrosine phosphatase, | 5787 | 21 | 22 |
| receptor type B (PTPRB) | | | |
| Isoform (b) of protein tyrosine phosphatase, | 5787 | 23 | 24 |
| receptor type B (PTPRB) | | | |
| Melanoma cell adhesion molecule (MCAM) | 4162 | 33 | 34 |
| (CD146) | | | |
| Isoform alpha 1 of human chromosome 18 open | 753 | 3 | 4 |
| reading frame 1 (C18orf1) | | | |
| Isoform alpha 2 of human chromosome 18 open | 753 | 5 | 6 |
| reading frame 1 (C18orf1) | | | |
| Isoform beta 1 of human chromosome 18 open | 753 | 7 | 8 |
| reading frame 1 (C18orf1) | | | |
| Isoform beta 2 of human chromosome 18 open | 753 | 9 | 10 |
| reading frame 1 (C18orf1) | | | |
| Isoform gamma 1 of human chromosome 18 | 753 | 11 | 12 |
| open reading frame 1 (C18orf1) | | | |
| Isoform gamma 2 of human chromosome 18 | 753 | 13 | 14 |
| open reading frame 1 (C18orf1) | | | |
| Aquaporin 3 (AQP3) | 360 | 37 | 38 |
| RGMB | 285704 | 267 | 268 |
| Isoform A of integrin alpha 6 (ITGA6) (CD49f) | 3655 | 39 | 40 |
| Isoform B of integrin alpha 6 (ITGA6) (CD49f) | 3655 | 41 | 42 |
| p53 apoptosis effector related to PMP22 | 64065 | 75 | 76 |
| (PERP) | | | |
| Isoform 1 of lipolysis stimulated lipoprotein | 51599 | 43 | 44 |
| receptor (LSR) | | | |
| Isoform 2 of lipolysis stimulated lipoprotein | 51599 | 45 | 46 |
| receptor (LSR) | | | |
| Isoform 3 of lipolysis stimulated lipoprotein | 51599 | 47 | 48 |
| receptor (LSR) | | | |
| WDFY family member 4 (WDFY4) | 57705 | 99 | 100 |
| ATP6V0A1 isoform a | 535 | 269 | 270 |
| ATP6V0A1 isoform b | 535 | 271 | 272 |
| ATP6V0A1 isoform c | 535 | 273 | 274 |
| ST8 alpha-N-acetyl-neuraminide alpha-2,8- | 338596 | 87 | 88 |
| sialyltransferase 6 (ST8SIA6) | | | |
| Isoform 1 of human chromosome 6 open | 84830 | 89 | 90 |
| reading frame 105 (C6orf105) | | | |
| Isoform 2 of human chromosome 6 open | 84830 | 91 | 92 |
| reading frame 105 (C6orf105) | | | |
| NIPA-like domain containing 2 (NPAL2) | 79815 | 95 | 96 |
| Variant 1 of transmembrane protein 169 | 92691 | 103 | 104 |
| (TMEM169) | | | |
| Variant 2 of transmembrane protein 169 | 92691 | 105 | 106 |
| (TMEM169) | | | |
| Variant 3 of transmembrane protein 169 | 92691 | 107 | 108 |
| (TMEM169) | | | |
| Variant 4 of transmembrane protein 169 | 92691 | 109 | 110 |
| (TMEM169) | | | |
| FRAS1 related extracellular matrix 3 (FREM3) | 166752 | 97 | 98 |
| EPH receptor B1 (EPHB1) | 2047 | 55 | 56 |
| Fc fragment of IgE, high affinity I, receptor for; | 2207 | 101 | 102 |
| gamma polypeptide (FCER1G) | | | |
| Tetraspanin 15 (TSPAN15) | 23555 | 93 | 94 |
| Plexin B2 (PLXNB2) | 23654 | 59 | 60 |
| V-set and immunoglobulin domain containing 1 | 340547 | 73 | 74 |
| protein (VSIG1) | | | |
| Neural proliferation, differentiation and control | 56654 | 53 | 54 |
| 1 protein (NPDC1) | | | |
| IL6R isoform 1 | 3570 | 275 | 276 |
| IL6R isoform 2 | 3570 | 277 | 278 |
| T cell immunoreceptor with Ig and ITIM | 201633 | 85 | 86 |
| domains (TIGIT) | | | |
| Isoform 1 of CD79A | 973 | 17 | 18 |
| Isoform 2 of CD79A | 973 | 19 | 20 |
| Interferon gamma receptor 2 (IFNGR2) | 3460 | 25 | 26 |
| Isoform 1 of CD33 | 945 | 29 | 30 |
| Isoform 2 of CD33 | 945 | 31 | 32 |
| Integrin alpha M (ITGAM) (CD11b) | 3684 | 35 | 36 |
| Isoform 1 of carcinoembryonic antigen-related | 634 | 49 | 50 |
| cell adhesion molecule 1 (CEACAM1) (CD66) | | | |
| Isoform 2 of carcinoembryonic antigen-related | 634 | 51 | 52 |
| cell adhesion molecule 1 (CEACAM1) (CD66) | | | |
| Isoform 1 of CD79B | 974 | 77 | 78 |
| Isoform 2 of CD79B | 974 | 79 | 80 |
| Isoform 3 of CD79B | 974 | 81 | 82 |
| Isoform 1 of CD8B | 926 | 63 | 64 |
| Isoform 2 of CD8B | 926 | 65 | 66 |
| Isoform 3 of CD8B | 926 | 67 | 68 |
| Isoform 4 of CD8B | 926 | 69 | 70 |
| Isoform 5 of CD8B | 926 | 71 | 72 |
| Toll-like receptor 6 (TLR6) | 10333 | 57 | 58 |
| Low density lipoprotein receptor-related protein | 4040 | 61 | 62 |
| 6 (LRP6) | | | |
| Sphingomyelin phosphodiesterase 3 (SMPD3) | 55512 | 1 | 2 |

TABLE 3
Protein biomarkers and nucleic acids encoding same that are downregulated
on/in Treg cells.

| | Entrez | | |
|---|---|---|---|
| | Accession | Nucleotide | Amino acid |
| Gene name | Number | SEQ ID NO: | SEQ ID NO: |
| ATPase, class I, type 8B, member 4 (ATP8B4) | 79895 | 143 | 144 |
| Mucolipin 2 (MCOLN2) | 255231 | 111 | 112 |
| Cysteinyl leukotriene receptor 1 (CYSLTR1) | 10800 | 141 | 142 |
| Integrin alpha 2 (ITGA2) | 3673 | 145 | 146 |
| G protein-coupled receptor 183 (GPR183) | 1880 | 169 | 170 |
| C-type lectin-like 1 (CLECL1) | 160365 | 113 | 114 |
| Cytotoxic and regulatory T cell molecule | 56253 | 237 | 238 |
| (CRTAM) | | | |
| CD9 | 928 | 153 | 154 |
| Isoform 1 of ectonucleotide | 5168 | 241 | 242 |
| pyrophosphatase/phosphodiesterase 2 (ENPP2) | | | |
| Isoform 2 of ectonucleotide | 5168 | 243 | 244 |
| pyrophosphatase/phosphodiesterase 2 (ENPP2) | | | |
| Isoform 3 of ectonucleotide | 2168 | 245 | 246 |
| pyrophosphatase/phosphodiesterase 2 (ENPP2) | | | |
| HEG homolog 1 (HEG1) | 57493 | 125 | 126 |
| Immediate early response 3 (IER3) | 8870 | 135 | 136 |
| CD274 | 29126 | 151 | 152 |
| Integrin alpha 1 (ITGA1) | 3672 | 149 | 150 |
| NKG7 | 4818 | 279 | 280 |
| SLAM family member 6 (SLAMF6) | 114836 | 247 | 248 |
| Sortilin 1 (SORT1) | 6272 | 177 | 178 |
| Tetraspanin 2 (TSPAN2) | 10100 | 189 | 190 |
| Lysophosphatidylcholine acyltransferase 2 | 54947 | 115 | 116 |
| (LPCAT2) | | | |
| Phospholipid scramblase 1 (PLSCR1) | 5359 | 229 | 230 |
| semaphorin 3A (SEMA3A) | 10371 | 155 | 156 |
| CD300A | 11314 | 147 | 148 |
| Isoform 1 of neuropilin 2 (NRP2) | 8828 | 157 | 158 |
| Isoform 2 of neuropilin 2 (NRP2) | 8828 | 159 | 160 |
| Isoform 3 of neuropilin 2 (NRP2) | 8828 | 161 | 162 |
| Isoform 4 of neuropilin 2 (NRP2) | 8828 | 163 | 164 |
| Isoform 5 of neuropilin 2 (NRP2) | 8828 | 165 | 166 |
| Isoform 6 of neuropilin 2 (NRP2) | 8828 | 167 | 168 |
| Mucolipin 3 (MCOLN3) | 55283 | 187 | 188 |
| Activin A receptor, type IIA (ACVR2A) | 92 | 175 | 176 |
| Epithelial mitogen homolog (EPGN) | 255324 | 191 | 192 |
| Syntaxin 3 (STX3) | 6809 | 123 | 124 |
| Variant 1 of leucine rich repeat neuronal 3 | 54674 | 117 | 118 |
| (LRRN3) | | | |
| Variant 2 of leucine rich repeat neuronal 3 | 54674 | 119 | 120 |
| (LRRN3) | | | |
| Variant 3 of leucine rich repeat neuronal 3 | 54674 | 121 | 122 |
| (LRRN3) | | | |
| Isoform a of CD200 receptor 1 (CD200R1) | 131450 | 179 | 180 |
| Isoform b of CD200 receptor 1 (CD200R1) | 131450 | 181 | 182 |
| Isoform c of CD200 receptor 1 (CD200R1) | 131450 | 183 | 184 |
| Isoform d of CD200 receptor 1 (CD200R1) | 131450 | 185 | 186 |
| isoform 1 of cytochrome b reductase 1 | 79901 | 171 | 172 |
| (CYBRD1) | | | |
| isoform 2 of cytochrome b reductase 1 | 79901 | 173 | 174 |
| (CYBRD1) | | | |
| Transmembrane protein 71 (TMEM71) | 137835 | 131 | 132 |
| LAG1 homolog, ceramide synthase 6 (LASS6) | 253782 | 231 | 232 |
| Transmembrane protein 200A, KIAA1913 | 114801 | 127 | 128 |
| (TMEM200A) | | | |
| isoform 1 of CD82 | 3732 | 225 | 226 |
| isoform 2 of CD82 | 3732 | 227 | 228 |
| Poliovirus receptor-related 3 (PVRL3) | 25945 | 255 | 256 |
| Isoform a of protein tyrosine phosphatase, | 5796 | 221 | 222 |
| receptor type, K (PTPRK) | | | |
| Isoform b of protein tyrosine phosphatase, | 5796 | 223 | 224 |
| receptor type, K (PTPRK) | | | |
| C-type lectin domain family 2, member B | 9976 | 239 | 240 |
| (CLEC2B) | | | |
| Lymphoid-restricted membrane protein | 4033 | 137 | 138 |
| (LRMP) | | | |
| Adhesion molecule with Ig-like domain 2 | 347902 | 251 | 252 |
| (AMIGO2) | | | |
| ATPase, class V, type 10D (ATP10D) | 57205 | 133 | 134 |
| Ral GEF with PH domain and SH3 binding | 55103 | 263 | 264 |
| motif 2 (RALGPS2) | | | |
| Isoform 1 of prostaglandin E receptor 3 | 5733 | 201 | 202 |
| (PTGER3) | | | |
| Isoform 2 of prostaglandin E receptor 3 | 5733 | 203 | 204 |
| (PTGER3) | | | |
| Isoform 3 of prostaglandin E receptor 3 | 5733 | 205 | 206 |
| (PTGER3) | | | |
| Isoform 4 of prostaglandin E receptor 3 | 5733 | 207 | 208 |
| (PTGER3) | | | |
| Isoform 5 of prostaglandin E receptor 3 | 5733 | 209 | 210 |
| (PTGER3) | | | |
| Isoform 6 of prostaglandin E receptor 3 | 5733 | 211 | 212 |
| (PTGER3) | | | |
| Isoform 7 of prostaglandin E receptor 3 | 5733 | 213 | 214 |
| (PTGER3) | | | |
| Isoform 8 of prostaglandin E receptor 3 | 5733 | 215 | 216 |
| (PTGER3) | | | |
| Isoform 9 of prostaglandin E receptor 3 | 5733 | 217 | 218 |
| (PTGER3) | | | |
| Isoform 10 of prostaglandin E receptor 3 | 5733 | 219 | 220 |
| (PTGER3) | | | |
| G protein-coupled receptor 174 (GPR174) | 84636 | 129 | 130 |
| Isoform a of sushi domain containing 4 | 55061 | 259 | 260 |
| (SUSD4) | | | |
| Isoform a of sushi domain containing 4 | 55061 | 261 | 262 |
| (SUSD4) | | | |
| Interleukin 18 receptor accessory protein | 8807 | 265 | 266 |
| (IL18RAP) | | | |
| Isoform 1 of phosphatidic acid phosphatase | 8611 | 193 | 194 |
| type 2A (PPAP2A) | | | |
| Isoform 2 of phosphatidic acid phosphatase | 8611 | 195 | 196 |
| type 2A (PPAP2A) | | | |
| Isoform 1 of adhesion molecule, interacts with | 120425 | 197 | 198 |
| CXADR antigen 1 (AMICA1) | | | |
| Isoform 2 of adhesion molecule, interacts with | 120425 | 199 | 200 |
| CXADR antigen 1 (AMICA1) | | | |
| GLI pathogenesis-related 1 protein (GLIPR1) | 11010 | 235 | 236 |
| G protein-coupled receptor 65 (GPR65) | 8477 | 257 | 258 |
| G protein-coupled receptor 15 (GPR15) | 2838 | 233 | 234 |
| Prostaglandin E receptor 4, subtype EP4 | 5734 | 139 | 140 |
| (PTGER4) | | | |
| Cornichon homolog 4 (CNIH4) | 29097 | 253 | 254 |
| Core 1 synthase, glycoprotein-N- | 56913 | 249 | 250 |
| acetylgalactosamine 3-beta- | | | |
| galactosyltransferase, 1 (C1GALT1) | | | |

TABLE 4
Preferred cell surface proteins and nucleic acids encoding same that are
upregulated on/in Treg cells.

| | Entrez | | |
|---|---|---|---|
| | Accession | Nucleotide | Amino acid |
| Gene name | Number | SEQ ID NO: | SEQ ID NO: |
| Peptidase inhibitor 16 (PI16) | 221476 | 27 | 28 |
| Interleukin 1 receptor, type I (IL1R1) (CD121) | 3554 | 15 | 16 |
| Polycystic kidney disease 1-like 3 (PKD1L3) | 342372 | 83 | 84 |
| Isoform (a) of protein tyrosine phosphatase, | 5787 | 21 | 22 |
| receptor type B (PTPRB) | | | |
| Isoform (b) of protein tyrosine phosphatase, | 5787 | 23 | 24 |
| receptor type B (PTPRB) | | | |
| Melanoma cell adhesion molecule (MCAM) | 4162 | 33 | 34 |
| (CD146) | | | |
| Isoform alpha 1 of human chromosome 18 open | 753 | 3 | 4 |
| reading frame 1 (C18orf1) | | | |
| Isoform alpha 2 of human chromosome 18 open | 753 | 5 | 16 |
| reading frame 1 (C18orf1) | | | |
| Isoform beta 1 of human chromosome 18 open | 753 | 7 | 8 |
| reading frame 1 (C18orf1) | | | |
| Isoform beta 2 of human chromosome 18 open | 753 | 9 | 10 |
| reading frame 1 (C18orf1) | | | |
| Isoform gamma 1 of human chromosome 18 | 753 | 11 | 12 |
| open reading frame 1 (C18orf1) | | | |
| Isoform gamma 2 of human chromosome 18 | 753 | 13 | 14 |
| open reading frame 1 (C18orf1) | | | |
| Aquaporin 3 (AQP3) | 360 | 37 | 38 |
| RGMB | 285704 | 267 | 268 |
| Isoform A of integrin alpha 6 (ITGA6) (CD49f) | 3655 | 39 | 40 |
| Isoform B of integrin alpha 6 (ITGA6) (CD49f) | 3655 | 41 | 42 |
| p53 apoptosis effector related to PMP22 | 64065 | 75 | 76 |
| (PERP) | | | |
| Isoform 1 of lipolysis stimulated lipoprotein | 51599 | 43 | 44 |
| receptor (LSR) | | | |
| Isoform 2 of lipolysis stimulated lipoprotein | 51599 | 45 | 46 |
| receptor (LSR) | | | |
| Isoform 3 of lipolysis stimulated lipoprotein | 51599 | 47 | 48 |
| receptor (LSR) | | | |
| WDFY family member 4 (WDFY4) | 57705 | 99 | 100 |
| ATP6V0A1 isoform a | 535 | 269 | 270 |
| ATP6V0A1 isoform b | 535 | 271 | 272 |
| ATP6V0A1 isoform c | 535 | 273 | 274 |
| ST8 alpha-N-acetyl-neuraminide alpha-2,8- | 338596 | 87 | 88 |
| sialyltransferase 6 (ST8SIA6) | | | |
| Isoform 1 of human chromosome 6 open | 84830 | 89 | 90 |
| reading frame 105 (C6orf105) | | | |
| Isoform 2 of human chromosome 6 open | 84830 | 91 | 92 |
| reading frame 105 (C6orf105) | | | |
| NIPA-like domain containing 2 (NPAL2) | 79815 | 95 | 96 |
| Variant 1 of transmembrane protein 169 | 92691 | 103 | 104 |
| (TMEM169) | | | |
| Variant 2 of transmembrane protein 169 | 92691 | 105 | 106 |
| (TMEM169) | | | |
| Variant 3 of transmembrane protein 169 | 92691 | 107 | 108 |
| (TMEM169) | | | |
| Variant 4 of transmembrane protein 169 | 92691 | 109 | 110 |
| (TMEM169) | | | |
| FRAS1 related extracellular matrix 3 (FREM3) | 166752 | 97 | 98 |
| IL6R isoform 1 | 3570 | 275 | 276 |
| IL6R isoform 2 | 3570 | 277 | 278 |
| T cell immunoreceptor with Ig and ITIM | 201633 | 85 | 86 |
| domains (TIGIT) | | | |

TABLE 5
Protein biomarkers and nucleic acids encoding same that are upregulated
on/in activated Treg cells.

| | | | Ami- |
|---|---|---|---|
| | | | no |
| | Entrez | Nucleo- | acid |
| | Acces- | tide | SEQ |
| | sion | SEQ ID | ID |
| Gene name | Number | NO: | NO: |
| Interleukin 1 receptor, type I (IL1R1) (CD121) | 3554 | 15 | 16 |
| Cysteinyl leukotriene receptor 1 (CYSLTR1) | 10800 | 141 | 142 |
| Integrin alpha 2 (ITGA2) | 3673 | 145 | 146 |
| G protein-coupled receptor 183 (GPR183) | 1880 | 169 | 170 |
| Cytotoxic and regulatory T cell molecule | 56253 | 237 | 238 |
| (CRTAM) | | | |
| Isoform 1 of ectonucleotide | 5168 | 241 | 242 |
| pyrophosphatase/phosphodiesterase 2 (ENPP2) | | | |
| Isoform 2 of ectonucleotide | 5168 | 243 | 244 |
| pyrophosphatase/phosphodiesterase 2 (ENPP2) | | | |
| Isoform 3 of ectonucleotide | 2168 | 245 | 246 |
| pyrophosphatase/phosphodiesterase 2 (ENPP2) | | | |
| Adhesion molecule with Ig-like domain 2 | 347902 | 251 | 252 |
| (AMIGO2) | | | |
| Poliovirus receptor-related 3 (PVRL3) | 25945 | 255 | 256 |
| Interleukin 18 receptor accessory protein | 8807 | 265 | 266 |
| (IL18RAP) | | | |
| T cell immunoreceptor with Ig and ITIM | 201633 | 85 | 86 |
| domains (TIGIT) | | | |
| HEG homolog 1 (HEG1) | 57493 | 125 | 126 |
| G protein-coupled receptor 174 (GPR174) | 84636 | 129 | 130 |
| Immediate early response 3 (IER3) | 8870 | 135 | 136 |
| Prostaglandin E receptor 4, subtype EP4 | 5734 | 139 | 140 |
| (PTGER4) | | | |

TABLE 6
Protein biomarkers and nucleic acids encoding same that are
downregulated on/in activated Treg cells.

| | | | Ami- |
|---|---|---|---|
| | | | no |
| | Entrez | Nucleo- | acid |
| | Acces- | tide | SEQ |
| | sion | SEQ ID | ID |
| Gene name | Number | NO: | NO: |
| IL6R isoform 1 | 3570 | 275 | 276 |
| IL6R isoform 2 | 3570 | 277 | 278 |
| Isoform A of integrin alpha 6 (ITGA6) | 3655 | 39 | 40 |
| Isoform B of integrin alpha 6 (ITGA6) | 3655 | 41 | 42 |
| ST8 alpha-N-acetyl-neuraminide alpha-2,8- | 338596 | 87 | 88 |
| sialyltransferase 6 (ST8SIA6) | | | |
| NIPA-like domain containing 2 (NPAL2) | 79815 | 95 | 96 |
| Variant 1 of transmembrane protein 169 | 92691 | 103 | 104 |
| (TMEM169) | | | |
| Variant 2 of transmembrane protein 169 | 92691 | 105 | 106 |
| (TMEM169) | | | |
| Variant 3 of transmembrane protein 169 | 92691 | 107 | 108 |
| (TMEM169) | | | |
| Variant 4 of transmembrane protein 169 | 92691 | 109 | 110 |
| (TMEM169) | | | |
| V-set and immunoglobulin domain containing 1 | 340547 | 73 | 74 |
| protein (VSIG1) | | | |
| Isoform 1 of CD79B | 974 | 77 | 78 |
| Isoform 2 of CD79B | 974 | 79 | 80 |
| Isoform 3 of CD79B | 974 | 81 | 82 |
| Toll-like receptor 6 (TLR6) | 10333 | 57 | 58 |
| Sphingomyelin phosphodiesterase 3 (SMPD3) | 55512 | 1 | 2 |
| SLAM family member 6 (SLAMF6) | 114836 | 247 | 248 |
| Syntaxin 3 (STX3) | 6809 | 123 | 124 |
| Lymphoid-restricted membrane protein | 4033 | 137 | 138 |
| (LRMP) | | | |

[0176] A preferred protein or nucleic acid comprises a sequence at least about 75% amino acid sequence identity to the amino acid sequence set forth in any one or more of Tables 2-6, preferably at least about 80% sequence identity, preferably at least about 85%, more preferably at least about 90%, even more preferably at least about 95% and still more preferably at least about 99%. The present invention is not to be restricted to the use of the exemplified Homo sapiens nucleic acids or proteins because, as will be known to those skilled in the art, it is possible to identify naturally-occurring variants and/or mutants of said nucleic acids and/or proteins using standard techniques, including in silico analysis, e.g., using BLAST.

[0177] The % identity of a nucleic acid or polypeptide is determined by GAP (Needleman and Wunsch, 1970) analysis (GCG program) with a gap creation penalty=5, and a gap extension penalty=0.3. The query sequence is at least 50 residues in length, and the GAP analysis aligns the two sequences over a region of at least 50 residues. Even more preferably, the query sequence is at least 100 residues in length and the GAP analysis aligns the two sequences over a region of at least 100 residues. Most preferably, the two sequences are aligned over their entire length.

[0178] In one example, reference herein to a protein or nucleic acid shall be taken to be a reference to a human sphingomyelin phosphodiesterase 3 (SMPD3) or nucleic acid encoding same.

[0179] In one example, reference herein to a protein or nucleic acid shall be taken to be a reference to a human chromosome 18 open reading frame 1 (C18orf1) protein or nucleic acid encoding same.

[0180] In one example, reference herein to a protein or nucleic acid shall be taken to be a reference to a human interleukin 1 receptor, type I (IL1R1) or nucleic acid encoding same.

[0181] In one example, reference herein to a protein or nucleic acid shall be taken to be a reference to a human CD79A or nucleic acid encoding same.

[0182] In one example, reference herein to a protein or nucleic acid shall be taken to be a reference to a human protein tyrosine phosphatase, receptor type B (PTPRB) or nucleic acid encoding same.

[0183] In one example, reference herein to a protein or nucleic acid shall be taken to be a reference to a human interferon gamma receptor 2 (IFNGR2) or nucleic acid encoding same.

[0184] In one example, reference herein to a protein or nucleic acid shall be taken to be a reference to a human peptidase inhibitor 16 (PI16) or nucleic acid encoding same.

[0185] In one example, reference herein to a protein or nucleic acid shall be taken to be a reference to a human CD33 or nucleic acid encoding same.

[0186] In one example, reference herein to a protein or nucleic acid shall be taken to be a reference to a human melanoma cell adhesion molecule (MCAM) or nucleic acid encoding same.

[0187] In one example, reference herein to a protein or nucleic acid shall be taken to be a reference to a human integrin alpha M (ITGAM) or nucleic acid encoding same.

[0188] In one example, reference herein to a protein or nucleic acid shall be taken to be a reference to a human aquaporin 3 (AQP3) or nucleic acid encoding same.

[0189] In one example, reference herein to a protein or nucleic acid shall be taken to be a reference to a human integrin alpha 6 (ITGA6) or nucleic acid encoding same.

[0190] In one example, reference herein to a protein or nucleic acid shall be taken to be a reference to a human lipolysis stimulated lipoprotein receptor (LSR) or nucleic acid encoding same.

[0191] In one example, reference herein to a protein or nucleic acid shall be taken to be a reference to a human carcinoembryonic antigen-related cell adhesion molecule 1 (CEACAM1) or nucleic acid encoding same.

[0192] In one example reference herein to a protein or nucleic acid shall be taken to be a reference to a neural proliferation, differentiation and control 1 protein (NPDC1) or nucleic acid encoding same.

[0193] In one example, reference herein to a protein or nucleic acid shall be taken to be a reference to an EPH receptor B1 (EPHB1) or nucleic acid encoding same.

[0194] In one example, reference herein to a protein or nucleic acid shall be taken to be a reference to a human toll-like receptor 6 (TLR6) or nucleic acid encoding same.

[0195] In one example, reference herein to a protein or nucleic acid shall be taken to be a reference to a human plexin B2 (PLXNB2) or nucleic acid encoding same.

[0196] In one example, reference herein to a protein or nucleic acid shall be taken to be a reference to a human low density lipoprotein receptor-related protein 6 (LRP6) or nucleic acid encoding same.

[0197] In one example, reference herein to a protein or nucleic acid shall be taken to be a reference to a human CD8Bor nucleic acid encoding same.

[0198] In one example, reference herein to a protein or nucleic acid shall be taken to be a reference to a human V-set and immunoglobulin domain containing 1 protein (VSIG1) or nucleic acid encoding same.

[0199] In one example, reference herein to a protein or nucleic acid shall be taken to be a reference to a human p53 apoptosis effector related to PMP22 (PERP) or nucleic acid encoding same.

[0200] In one example, reference herein to a protein or nucleic acid shall be taken to be a reference to a human CD79Bor nucleic acid encoding same.

[0201] In one example, reference herein to a protein or nucleic acid shall be taken to be a reference to a human polycystic kidney disease 1-like 3 (PKD1L3) or nucleic acid encoding same.

[0202] In one example, reference herein to a protein or nucleic acid shall be taken to be a reference to a human T cell immunoreceptor with Ig and ITIM domains (TIGIT) or nucleic acid encoding same.

[0203] In one example, reference herein to a protein or nucleic acid shall be taken to be a reference to a human ST8 alpha-N-acetyl-neuraminide alpha-2,8-sialyltransferase 6 (ST8SIA6) or nucleic acid encoding same.

[0204] In one example, reference herein to a protein or nucleic acid shall be taken to be a reference to a human chromosome 6 open reading frame 105 (C6orf105) protein or nucleic acid encoding same.

[0205] In one example, reference herein to a protein or nucleic acid shall be taken to be a reference to a human tetraspanin 15 (TSPAN15) or nucleic acid encoding same.

[0206] In one example, reference herein to a protein or nucleic acid shall be taken to be a reference to a human NIPA-like domain containing 2 (NPAL2) or nucleic acid encoding same.

[0207] In one example, reference herein to a protein or nucleic acid shall be taken to be a reference to a human FRAS1 related extracellular matrix 3 (FREM3) or nucleic acid encoding same.

[0208] In one example, reference herein to a protein or nucleic acid shall be taken to be a reference to a human WDFY family member 4 (WDFY4) or nucleic acid encoding same.

[0209] In one example, reference herein to a protein or nucleic acid shall be taken to be a reference to a human Fc fragment of IgE, high affinity I, receptor for; gamma polypeptide (FCER1G) or nucleic acid encoding same.

[0210] In one example, reference herein to a protein or nucleic acid shall be taken to be a reference to a human transmembrane protein 169 (TMEM169) or nucleic acid encoding same.

[0211] Preferably, any of the foregoing proteins is expressed at a higher level than in a Thelper cell.

[0212] In one example, reference herein to a protein or nucleic acid shall be taken to be a reference to a human mucolipin 2 (MCOLN2) or nucleic acid encoding same.

[0213] In one example, reference herein to a protein or nucleic acid shall be taken to be a reference to a human C-type lectin-like 1 (CLECL1) or nucleic acid encoding same.

[0214] In one example, reference herein to a protein or nucleic acid shall be taken to be a reference to a human lysophosphatidylcholine acyltransferase 2 (LPCAT2) or nucleic acid encoding same.

[0215] In one example, reference herein to a protein or nucleic acid shall be taken to be a reference to a human leucine rich repeat neuronal 3 (LRRN3) or nucleic acid encoding same.

[0216] In one example, reference herein to a protein or nucleic acid shall be taken to be a reference to a human syntaxin 3 (STX3) or nucleic acid encoding same.

[0217] In one example, reference herein to a protein or nucleic acid shall be taken to be a reference to a human HEG homolog 1 (HEG1) or nucleic acid encoding same.

[0218] In one example, reference herein to a protein or nucleic acid shall be taken to be a reference to a human transmembrane protein 200A, KIAA1913 (TMEM200A) or nucleic acid encoding same.

[0219] In one example, reference herein to a protein or nucleic acid shall be taken to be a reference to a human G protein-coupled receptor 174 (GPR174) or nucleic acid encoding same.

[0220] In one example, reference herein to a protein or nucleic acid shall be taken to be a reference to a human transmembrane protein 71 (TMEM71) or nucleic acid encoding same.

[0221] In one example, reference herein to a protein or nucleic acid shall be taken to be a reference to a human ATPase, class V, type 10D (ATP10D) or nucleic acid encoding same.

[0222] In one example, reference herein to a protein or nucleic acid shall be taken to be a reference to a human immediate early response 3 (IER3) or nucleic acid encoding same.

[0223] In one example, reference herein to a protein or nucleic acid shall be taken to be a reference to a human lymphoid-restricted membrane protein (LRMP) or nucleic acid encoding same.

[0224] In one example, reference herein to a protein or nucleic acid shall be taken to be a reference to a human prostaglandin E receptor 4, subtype EP4 (PTGER4) or nucleic acid encoding same.

[0225] In one example, reference herein to a protein or nucleic acid shall be taken to be a reference to a human cysteinyl leukotriene receptor 1 (CYSLTR1) or nucleic acid encoding same.

[0226] In one example reference herein to a protein or nucleic acid shall be taken to be a reference to a human ATPase, class I, type 8B, member 4 (ATP8B4) or nucleic acid encoding same.

[0227] In one example, reference herein to a protein or nucleic acid shall be taken to be a reference to a human integrin alpha 2 (ITGA2) or nucleic acid encoding same.

[0228] In one example, reference herein to a protein or nucleic acid shall be taken to be a reference to a human CD300A or nucleic acid encoding same.

[0229] In one example, reference herein to a protein or nucleic acid shall be taken to be a reference to a human integrin alpha 1 (ITGA1) or nucleic acid encoding same.

[0230] In one example, reference herein to a protein or nucleic acid shall be taken to be a reference to a human CD274 or nucleic acid encoding same.

[0231] In one example, reference herein to a protein or nucleic acid shall be taken to be a reference to a human CD9 or nucleic acid encoding same.

[0232] In one example, reference herein to a protein or nucleic acid shall be taken to be a reference to a human semaphorin 3A (SEMA3A) or nucleic acid encoding same.

[0233] In one example, reference herein to a protein or nucleic acid shall be taken to be a reference to a human neuropilin 2 (NRP2) or nucleic acid encoding same.

[0234] In one example, example reference herein to a protein or nucleic acid shall be taken to be a reference to a human G protein-coupled receptor 183 (GPR183) or nucleic acid encoding same.

[0235] In one example, reference herein to a protein or nucleic acid shall be taken to be a reference to a human cytochrome b reductase 1 (CYBRD1) or nucleic acid encoding same.

[0236] In one example, reference herein to a protein or nucleic acid shall be taken to be a reference to a human activin A receptor, type IIA (ACVR2A) or nucleic acid encoding same.

[0237] In one example, reference herein to a protein or nucleic acid shall be taken to be a reference to a human sortilin 1 (SORT1) or nucleic acid.

[0238] In one example, reference herein to a protein or nucleic acid shall be taken to be a reference to a human CD200 receptor 1 (CD200R1) or nucleic acid encoding same.

[0239] In one example, reference herein to a protein or nucleic acid shall be taken to be a reference to a human mucolipin 3 (MCOLN3) or nucleic acid encoding same.

[0240] In one example, reference herein to a protein or nucleic acid shall be taken to be a reference to a tetraspanin 2 (TSPAN2) or nucleic acid encoding same.

[0241] In one example, reference herein to a protein or nucleic acid shall be taken to be a reference to a human epithelial mitogen homolog (EPGN) or nucleic acid encoding same.

[0242] In one example, reference herein to a protein or nucleic acid shall be taken to be a reference to a human phosphatidic acid phosphatase type 2A (PPAP2A) or nucleic acid encoding same.

[0243] In one example, reference herein to a protein or nucleic acid shall be taken to be a reference to a human adhesion molecule, interacts with CXADR antigen 1 (AMICA1) or nucleic acid encoding same.

[0244] In one example, reference herein to a protein or nucleic acid shall be taken to be a reference to a human prostaglandin E receptor 3 (PTGER3) or nucleic acid encoding same.

[0245] In one example, reference herein to a protein or nucleic acid shall be taken to be a reference to a human protein tyrosine phosphatase, receptor type, K (PTPRK) or nucleic acid encoding same.

[0246] In one example, reference herein to a protein or nucleic acid shall be taken to be a reference to a human CD82 or nucleic acid encoding same.

[0247] In one example, reference herein to a protein or nucleic acid shall be taken to be a reference to a human phospholipid scramblase 1 (PLSCR1) or nucleic acid.

[0248] In one example, reference herein to a protein or nucleic acid shall be taken to be a reference to a human LAG1 homolog, ceramide synthase 6 (LASS6) or nucleic acid encoding same.

[0249] In one example, reference herein to a protein or nucleic acid shall be taken to be a reference to a human G protein-coupled receptor 15 (GPR15) or nucleic acid encoding same.

[0250] In one example, reference herein to a protein or nucleic acid shall be taken to be a reference to a human GLI pathogenesis-related 1 protein (GLIPR1) or nucleic acid encoding same.

[0251] In one example, reference herein to a protein or nucleic acid shall be taken to be a reference to a human cytotoxic and regulatory T cell molecule (CRTAM) or nucleic acid encoding same.

[0252] In one example, reference herein to a protein or nucleic acid shall be taken to be a reference to a human C-type lectin domain family 2, member B (CLEC2B) or nucleic acid encoding same.

[0253] In one example, reference herein to a protein or nucleic acid shall be taken to be a reference to a human ectonucleotide pyrophosphatase/phosphodiesterase 2 (ENPP2) or nucleic acid encoding same.

[0254] In one example, reference herein to a protein or nucleic acid shall be taken to be a reference to a human SLAM family member 6 (SLAMF6) or nucleic acid encoding same.

[0255] In one example, reference herein to a protein or nucleic acid shall be taken to be a reference to a human core 1 synthase, glycoprotein-N-acetylgalactosamine 3-beta-galactosyltransferase, 1 (C1GALT1) or nucleic acid encoding same.

[0256] In one example, reference herein to a protein or nucleic acid shall be taken to be a reference to a human adhesion molecule with Ig-like domain 2 (AMIGO2) or nucleic acid encoding same.

[0257] In one example, reference herein to a protein or nucleic acid shall be taken to be a reference to a human cornichon homolog 4 (CNIH4) or nucleic acid encoding same.

[0258] In one example, reference herein to a protein or nucleic acid shall be taken to be a reference to a human poliovirus receptor-related 3 (PVRL3) or nucleic acid encoding same.

[0259] In one example, reference herein to a protein or nucleic acid shall be taken to be a reference to a RGM domain family member B or nucleic acid encoding same.

[0260] In one example, reference herein to a protein or nucleic acid shall be taken to be a reference to a ATPase, H+ transporting, lysosomal V0 subunit a1 (ATP6V0A1), or nucleic acid encoding same.

[0261] In one example, reference herein to a protein or nucleic acid shall be taken to be a reference to an interleukin 6 receptor (IL6R) or nucleic acid encoding same.

[0262] In one example, reference herein to a protein or nucleic acid shall be taken to be a reference to a natural killer cell group 7 sequence (NKG7) or nucleic acid encoding same.

[0263] In one example, reference herein to a protein or nucleic acid shall be taken to be a reference to a human G protein-coupled receptor 65 (GPR65) or nucleic acid encoding same.

[0264] In one example, reference herein to a protein or nucleic acid shall be taken to be a reference to a human sushi domain containing 4 (SUSD4) or nucleic acid encoding same.

[0265] In one example, reference herein to a protein or nucleic acid shall be taken to be a reference to a human Ra1 GEF with PH domain and SH3 binding motif 2 (RALGPS2) or nucleic acid encoding same.

[0266] In one example, reference herein to a protein or nucleic acid shall be taken to be a reference to a human interleukin 18 receptor accessory protein (IL18RAP) or nucleic acid encoding same.

[0267] In one example of the present invention, a marker set forth in any one of Tables 2, 4 or 5 are expressed on a Treg cell (i.e., are positive for expression) or are expressed at a high or “hi” level on a Treg cell.

[0268] As used herein, the term “positive expression” or “+” shall be taken to mean expression above the level of background, e.g., as detected using an isotype control compound, e.g., antibody.

[0269] As used herein, the term “isotype control compound” shall be taken to mean a compound, preferably an antibody of the same isotype as that used to detect expression of a protein, however having no relevant specificity to a protein and conjugated to the same detectable moiety as the compound used to detect expression of the protein. Such a control aids in distinguishing non-specific “background” binding from specific binding.

[0270] Reference to a “high” or “hi” level of expression means the 50% of cells, preferably 40%, 30% or more preferably 20%, more preferably 10% of cells in a population of cells expressing the highest level of the recited marker, e.g., as determined using FACS analysis.

[0271] In one example of the present invention, a marker set forth in any one of Tables 3 or 6 are expressed on a Treg cell at a low or “lo” level.

[0272] As used herein, the term “negative expression” or “−”shall be taken to mean expression equal to or less than the level of background expression, e.g., as detected using an isotype control compound, e.g., antibody.

[0273] Reference to a “low” or “lo” level of expression shall be taken to mean the 50% or 60% or 70% or 80% or 90% of cells in a population of cells with lowest level of expression of the recited nucleic acid or protein in a population of cells.

[0274] The present invention also encompasses the detection of any combination of nucleic acids or proteins set forth in any one or more of Tables 2-6. For example, any embodiment described herein shall be taken to apply mutatis mutandis to detection of any two or more nucleic acids and/or proteins individually or collectively set forth in any one or more of Tables 2-6. Similarly, the present invention shall be taken to encompass detection of any combination of protein and nucleic acid markers individually or collectively set forth in any one or more of Tables 2-6.

[0275] By “individually” is meant that the invention encompasses the recited nucleic acids or proteins or groups nucleic acids and/or proteins separately, and that, notwithstanding that individual nucleic acid(s) and/or protein(s) or groups of nucleic acids and/or proteins may not be separately listed herein the accompanying claims may define such nucleic acid(s) and/or protein(s) or groups of nucleic acids and/or proteins separately and divisibly from each other.

[0276] By “collectively” is meant that the invention encompasses any number or combination of the recited nucleic acids and/or proteins or groups of nucleic acids and/or proteins, and that, notwithstanding that such numbers or combinations of nucleic acid(s) and/or proteins(s) or groups of nucleic acids and/or proteins may not be specifically listed herein the accompanying claims may define such combinations or sub-combinations separately and divisibly from any other combination of nucleic acid(s) and/or protein(s) or groups of nucleic acids and/or proteins.

[0277] The present invention also contemplates detection of any individual or collection of proteins or nucleic acids described herein according to any embodiment together with any other marker, e.g., of a Treg cell. Exemplary additional proteins or nucleic acids include, CD4, CD25, FoxP3, cytotoxic T-lymphocyte-associated antigen 4 (CTLA-4), CD62 ligand (CD62L), CD134 (OX40), glucocorticoid-induced tumor necrosis factor receptor (GITR), membrane-bound TGF-β, CD96, programmed cell death ligand 1 (PD-L1), α₄β₇ integrin, α₄β₁ integrin, CD45R0, CD27, CD95, CCR6. Preferred additional proteins or nucleic acids are CD4 and/or CD25 and/or FoxP3. Preferably, CD25 is expressed at a high level.

[0278] In another example, a method for detecting or isolating Treg cells additionally comprises detecting a low or undetectable level of expression of a nucleic acid or protein expressed by a non-Treg cell. Exemplary nucleic acids and/or proteins include CD19 and/or CD20 and/or CD14 and/or CD56.

### Detection/Isolation/Diagnostic/Therapeutic Compounds

[0279] The present invention encompasses a variety of reagents useful in detecting/isolating Treg cells and/or diagnosing/prognosing/treating/preventing Treg-mediated conditions. Compounds include antibodies, proteins comprising antibody variable regions, peptides, nucleic acid-based reagents, and small molecules. Any compound for treating a subject can be tested in vitro and/or in vivo using models of Treg activity and/or Treg-associated disease, e.g., as described herein.

### Protein Compounds

### Antibodies and Proteins Comprising Variable Regions

[0280] Preferably, a method as described herein according to any embodiment detects a protein and/or isolates a population enriched for Treg cells using an antibody or a protein comprising a variable region or Fv of an antibody and/or involves administering an antibody or protein comprising a variable region or Fv thereof.

[0281] The skilled artisan will be aware that an “antibody” includes an immune protein capable of specifically binding to one or a few closely related antigens (e.g., PI16) by virtue of an antigen binding site contained within at least one variable region. This term includes four chain antibodies (e.g., two light chains and two heavy chains), recombinant or modified antibodies (e.g., chimeric antibodies, humanized antibodies, primatized antibodies, de-immunized antibodies, half antibodies, bispecific antibodies) and single domain antibodies such as domain antibodies and heavy chain only antibodies (e.g., camelid antibodies or cartilaginous fish immunoglobulin new antigen receptors (IgNARs)). An antibody generally comprises constant domains, which can be arranged into a constant region or constant fragment or fragment crystallisable (Fc). Preferred forms of antibodies comprise a four-chain structure as their basic unit. Full-length antibodies comprise two heavy chains (˜50-70 kD) covalently linked and two light chains (˜23 kD each). A light chain generally comprises a variable region and a constant domain and in mammals is either a κ light chain or a λ light chain. A heavy chain generally comprises a variable region and one or two constant domain(s) linked by a hinge region to additional constant domain(s). Heavy chains of mammals are of one of the following types α, δ, ε, γ, or μ. Each light chain is also covalently linked to one of the heavy chains. For example, the two heavy chains and the heavy and light chains are held together by inter-chain disulfide bonds and by non-covalent interactions. The number of inter-chain disulfide bonds can vary among different types of antibodies. Each chain has an N-terminal variable region (V_{H} or V_{L} wherein each are ˜110 amino acids in length) and one or more constant domains at the C-terminus. The constant domain of the light chain (C_{L} which is ˜110 amino acids in length) is aligned with and disulfide bonded to the first constant domain of the heavy chain (C_{H} which is −330-440 amino acids in length). The light chain variable region is aligned with the variable region of the heavy chain. The antibody heavy chain can comprise 2 or more additional C_{H} domains (such as, C_{H}2, C_{H}3 and the like) and can comprise a hinge region can be identified between the C_{H}1 and Cm constant domains. Antibodies can be of any type (e.g., IgG, IgE, IgM, IgD, IgA, and IgY), class (e.g., IgG₁, IgG₂, IgG₃, IgG₄, IgA1 and IgA₂) or subclass. Preferably, the antibody is a murine (mouse or rat) antibody or a primate (preferably human) antibody. Preferably, the antibody is a monoclonal antibody. The term “antibody” also encompasses antibody derivatives, e.g., antibody conjugates.

[0282] As used herein, the term “protein comprising an antigen binding domain” shall be taken to mean any fragment or domain or protein comprising same of an antibody that retains the ability to bind to the target protein preferably specifically or selectively. This term also includes a polypeptide comprising a plurality of antigen binding domains of an antibody and/or a plurality of antigen binding domains wherein a domain is from one antibody and another domain is from another antibody. The domains may be in a single polypeptide chain or in multiple polypeptide chains (e.g., in the case of a diabody or higher order multimer). This term includes a Fab fragment, a Fab′ fragment, a F(ab′) fragment, a single chain antibody (SCA or SCAB), a diabody or higher order multimer amongst others. An “Fab fragment” consists of a monovalent antigen-binding fragment of an antibody molecule, and can be produced by digestion of a whole antibody molecule with the enzyme papain, to yield a fragment consisting of an intact light chain and a portion of a heavy chain. Such fragments can also be produced using recombinant means. An “Fab′ fragment” of an antibody molecule can be obtained by treating a whole antibody molecule with pepsin, followed by reduction, to yield a molecule consisting of an intact light chain and a portion of a heavy chain. Two Fab′ fragments are obtained per antibody molecule treated in this manner. Such fragments can also be produced using recombinant means. An “F(ab′)2 fragment” of an antibody consists of a dimer of two Fab′ fragments held together by two disulfide bonds, and is obtained by treating a whole antibody molecule with the enzyme pepsin, without subsequent reduction. Such fragments can also be produced using recombinant means. An “scFv fragment” is a genetically engineered fragment containing the variable region of a light chain and the variable region of a heavy chain expressed as two chains. A “single chain antibody” (SCA) is a genetically engineered single chain molecule containing the variable region of a light chain and the variable region of a heavy chain, linked by a suitable, flexible polypeptide linker. This term also encompasses domain antibodies (dAbs) comprising a single variable domain, a heavy chain only antibody (e.g., from camelid or cartilaginous fish) or a minibody or a flex minibody or a diabody or a triabody or a tetrabody or a higher order multimer or any protein discussed above fused to a constant region of an antibody or a Fc region of an antibody or a C_{H}2 and/or C_{H}3 region of an antibody.

[0283] The term “protein” shall be taken to include a single polypeptide chain, i.e., a series of contiguous amino acids linked by peptide bonds or a series of polypeptide chains covalently or non-covalently linked to one another (i.e., a polypeptide complex). For example, the series of polypeptide chains can be covalently linked using a suitable chemical or a disulphide bond. Examples of non-covalent bonds include hydrogen bonds, ionic bonds, Van der Waals forces, and hydrophobic interactions. A non-covalent bond contemplated by the present invention is the interaction between a V_{H} and a V_{L}, e.g., in some forms of diabody or a triabody or a tetrabody or a Fv.

[0284] The term “polypeptide chain” will be understood to mean from the foregoing paragraph to mean a series of contiguous amino acids linked by peptide bonds.

[0285] For some embodiments described herein antibodies can be obtained from commercial sources, as will be apparent to the skilled artisan. For example, antibodies against IL1R1 are available from R&D Systems, Inc. or AbCam Ltd; antibodies against CD79A are available from Becton Dickinson Inc; antibodies against PTPRB are available from Becton Dickinson Inc or Santa Cruz Biotechnology, Inc; antibodies against IFNGR2 are available from R&D Systems, Inc. or AbCam Ltd; antibodies against MCAM are available from R&D Systems, Inc. or AbCam Ltd; antibodies against LSR are available from LSR; antibodies against CD33 are available from Becton Dickinson Inc; antibodies against PI16 are available from R&D Systems, Inc or Abnova; antibodies against c18orf1 are available from Abnova or Santa Cruz Biotechnology, Inc.; antibodies against ITGAM are available from Becton Dickinson Inc; antibodies against CECAM are available from R&D Systems, Inc. or AbCam Ltd; antibodies against AQP3 are available from Santa Cruz Biotechnology, Inc.; antibodies against NPDC1 are available from AbCam Ltd or Santa Cruz Biotechnology, Inc.; antibodies against EPHB1 are available from AbCam Ltd or Santa Cruz Biotechnology, Inc.; antibodies against ITGA6 are available from AbCam Ltd or Santa Cruz Biotechnology, Inc.; antibodies against PLXNB2 are available from AbCam Ltd or Santa Cruz Biotechnology, Inc.; antibodies against CD79B are available from Becton Dickinson Inc; antibodies against CD8B are available from Becton Dickinson Inc, or Santa Cruz Biotechnology, Inc; antibodies against TLR6 are available from AbCam Ltd or Santa Cruz Biotechnology, Inc.; antibodies against VSIG1 are available from R&D Systems, Inc. or Abnova; antibodies against LRP6 are available from &D Systems, Inc. or AbCam Ltd; antibodies against PERP are available from AbCam Ltd or Santa Cruz Biotechnology, Inc.; antibodies against PKD1L3 are available from AbCam Ltd; antibodies against FCER1G are available from Santa Cruz Biotechnology Inc; and antibodies against TSPAN15 are available from Santa Cruz Biotechnology Inc.

[0286] To generate antibodies, a protein or immunogenic fragment or epitope thereof or a cell expressing and displaying same, optionally formulated with any suitable or desired carrier, adjuvant, BRM, or pharmaceutically acceptable excipient, is conveniently administered in the form of an injectable composition. Injection may be intranasal, intramuscular, sub-cutaneous, intravenous, intradermal, intraperitoneal, or by other known route. For intravenous injection, it is desirable to include one or more fluid and nutrient replenishers. Means for preparing and characterizing antibodies are known in the art. (See, e.g., ANTIBODIES: A LABORATORY MANUAL, Cold Spring Harbor Laboratory, 1988, incorporated herein by reference).

[0287] Immunogenic peptides for generating polyclonal or monoclonal antibodies can be covalently coupled to an immunogenic carrier protein, such as Diphtheria toxoid (DT), Keyhole Limpet Hemocyanin (KLH), tetanus toxoid (TT) or the nuclear protein of influenza virus (NP), using one of several conjugation chemistries known in the art. This enhances the immunogenicity of peptides that are otherwise not highly immunogenic in animals e.g., mice, rats, chickens etc. Methods of preparing and/or carrier proteins are known in the art and described, for example, in U.S. Pat. No. 4,709,017, 5,843,711, 5,601,827, 5,917,017 and Lee, et al., 1980).

[0288] The conjugate molecules so produced may be purified and employed in immunogenic compositions to elicit, upon administration to a host, an immune response to the protein and/or peptide which is potentiated in comparison to the protein or peptide alone.

[0289] The efficacy of the protein or immunogenic fragment or epitope thereof or cell expressing same in producing an antibody is established by injecting an animal, for example, a mouse, chicken, rat, rabbit, guinea pig, dog, horse, cow, goat or pig, with a formulation comprising the protein or immunogenic fragment or epitope thereof, and then monitoring the immune response to the protein, epitope or fragment. Both primary and secondary immune responses are monitored. The antibody titer is determined using any conventional immunoassay, such as, for example, ELISA, or radio-immunoassay.

[0290] The production of polyclonal antibodies may be monitored by sampling blood of the immunized animal at various points following immunization. A second, booster injection, may be given, if required to achieve a desired antibody titer. The process of boosting and titering is repeated until a suitable titer is achieved. When a desired level of immunogenicity is obtained, the immunized animal is bled and the serum isolated and stored, and/or the animal is used to generate monoclonal antibodies (Mabs).

[0291] Monoclonal antibodies are particularly preferred. The term “monoclonal antibody” refers to a homogeneous antibody population capable of binding to the same antigen(s) and, preferably, to the same epitopic determinant within the antigen(s). This term is not intended to be limited as regards to the source of the antibody or the manner in which it is made.

[0292] For the production of monoclonal antibodies (Mabs) any one of a number of known techniques may be used, such as, for example, the procedure exemplified in U.S. Pat. No. 4,196,265 or ANTIBODIES: A LABORATORY MANUAL, Cold Spring Harbor Laboratory, 1988, or Zola, 1997, each of which are incorporated herein by reference.

[0293] For example, a suitable animal is immunized with an effective amount of the protein or immunogenic fragment or epitope thereof or cell expressing same under conditions sufficient to stimulate antibody producing cells. Rodents such as rabbits, mice and rats are preferred animals, however, the use of sheep or frog cells is also possible. The use of rats may provide certain advantages, but mice or rabbits are preferred, with the BALB/c or C57/b16 mouse being preferred as the most routinely used animal and one that generally gives a higher percentage of stable fusions. Alternatively, a mouse genetically-engineered to express human immunoglobulin proteins, and preferably not express murine immunoglobulin proteins, is immunized to produce an antibody of the present invention. Such mice are known in the art and commercially available. For example, Regeneron, Inc. have produced the VelocImmune™ mouse in which human variable regions have been homologously recombined or knocked-in to the mouse genome to replace endogenous mouse variable region encoding genes. Such mice are described, for example, in WO2002/066630. Abgenix/Amgen, Inc. and Kirin Brewery/Medarex, Inc. have produced strains of mice in which the endogenous mouse immunoglobulin loci are inactivated or “knocked-out” and human immunoglobulin loci introduced using yeast artificial chromosomes. Examples of these mice are described or reviewed in Lonberg et al., (1994); Lonberg, (1994); Tomizuka et al., (2000) and Jakobovits et al., (2007).

[0294] Following immunization, somatic cells with the potential for producing antibodies, specifically B lymphocytes (B cells), are selected for use in the MAb generating protocol. These cells may be obtained from biopsies of spleens, tonsils or lymph nodes, or from a peripheral blood sample. Spleen cells and peripheral blood cells are preferred, the former because they are a rich source of antibody-producing cells that are in the dividing plasmablast stage, and the latter because peripheral blood is easily accessible. Spleen lymphocytes are obtained by homogenizing the spleen with a syringe. The B cells from the immunized animal are then fused with cells of an immortal myeloma cell, generally derived from the same species as the animal that was immunized with the immunogen. Any one of a number of myeloma cells may be used and these are known to those of skill in the art (e.g. murine P3-X63/Ag8, X63-Ag8.653, NS1/1.Ag 4 1, Sp2/0-Ag14, FO, NSO/U, MPC-I 1, MPC11—X45-GTG 1.7 and S194/5XX0).

[0295] To generate hybrids of antibody-producing spleen or lymph node cells and myeloma cells, somatic cells are mixed with myeloma cells in the presence of an agent or agents (chemical or electrical) that promote the fusion of cell membranes. Fusion methods using Sendai virus have been described by Kohler and Milstein, (1975); and Kohler and Milstein, (1976). Methods using polyethylene glycol (PEG), such as 37% (v/v) PEG, are described in detail by Gefter et al, (1977). The use of electrically induced fusion methods is also appropriate.

[0296] Hybrids are amplified by culture in a selective medium comprising an agent that blocks the de novo synthesis of nucleotides in the tissue culture media. Exemplary and preferred agents are aminopterin, methotrexate and azaserine.

[0297] The amplified hybridomas are subjected to a functional selection for antibody specificity and/or titer, such as, for example, by immunoassay (e.g. radioimmunoassay, enzyme immunoassay, cytotoxicity assay, plaque assay, dot immunoassay, and the like).

[0298] The selected hybridomas are serially diluted and cloned into individual antibody-producing cell lines, which clones can then be propagated for an extended period, e.g., indefinitely to provide MAbs. The individual cell lines can be cultured in vitro, where the MAbs are naturally secreted into the culture medium from which they are readily obtained in high concentrations. MAbs produced by either means may be further purified, if desired, using filtration, centrifugation and various chromatographic methods such as HPLC or affinity chromatography.

[0299] Alternatively, ABL-MYC technology (NeoClone, Madison Wis. 53713, USA) is used to produce cell lines secreting monoclonal antibodies (mAbs) against a protein as described herein according to any embodiment or an epitope or immunogenic fragment thereof. This technology comprises infecting splenocytes from immunized mice with replication-incompetent retrovirus comprising the oncogenes v-abl and c-myc. Splenocytes are transplanted into naive mice which then develop ascites fluid containing cell lines producing monoclonal antibodies (mAbs) against a protein as described herein according to any embodiment or an epitope or immunogenic fragment thereof. The mAbs are purified from ascites using protein G or protein A, e.g., bound to a solid matrix, depending on the isotype of the mAb. The ABL-MYC technology is described generically in detail in Largaespada (1990); Weissinger et al., (1991); Largaespada et al, (1992); Weissinger et al, (1994); Largaespada et al, (1996); and Kumar et al, (1999).

[0300] Antibodies can also be produced or isolated by screening a display library, e.g., a phage display library where, for example the phage express scFv fragments on the surface of their coat with a large variety of CDRs. For example, McCafferty et al, (1990), Clackson et al, (1991) and Marks et al, (1991) describe the isolation of murine and/or human antibodies, using phage libraries. Subsequent publications describe the production of high affinity (nM range) human antibodies by chain shuffling (Marks et al, 1992), as well as combinatorial infection and in vivo recombination as a strategy for constructing very large phage libraries (Waterhouse et al, 1993).

### Recombinant Antibody Production

[0301] The antibodies or fragments of the present invention can also be produced recombinantly, using techniques and materials readily obtainable.

[0302] For example, DNA encoding an antibody of the invention or a protein comprising a variable region thereof, e.g., a Fab fragment is readily isolated and sequenced using conventional procedures (e.g., by using oligonucleotide probes that are capable of binding specifically to genes encoding the heavy and light chains of murine antibodies). A hybridoma cell serve as a preferred source of such DNA. Once isolated, the DNA may be placed into expression vectors, which are then transfected into host cells such as E. coli cells, simian COS cells, Chinese Hamster Ovary (CHO) cells, or myeloma cells that do not otherwise produce antibody protein, to obtain the synthesis of monoclonal antibodies in the recombinant host cells. Review articles on recombinant expression in bacteria of DNA encoding the antibody include Skerra et al, (1993) and Pluckthun, (1992). Molecular cloning techniques to achieve these ends are known in the art and described, for example in Ausubel or Sambrook. A wide variety of cloning and in vitro amplification methods are suitable for the construction of recombinant nucleic acids. Examples of these techniques and instructions sufficient to direct persons of skill through many cloning exercises are found in Berger and Kimmel, Guide to Molecular Cloning Techniques, Methods in Enzymology volume 152 Academic Press, Inc., San Diego, Calif. (Berger); Sambrook et al., (1989) Molecular Cloning A Laboratory Manual (2nd ed.) Vol. 1 3, Cold Spring Harbor Laboratory, Cold Spring Harbor Press, N.Y., (Sambrook); and Current Protocols in Molecular Biology, F. M. Ausubel et al., eds., Current Protocols, a joint venture between Greene Publishing Associates, Inc. and John Wiley & Sons, Inc., (1994 Supplement) (Ausubel). Methods of producing recombinant immunoglobulins are also known in the art. See U.S. Pat. No. 4,816,567; and Queen et al., (1989).

[0303] For recombinant production of an antibody or fragment, the nucleic acid encoding it is preferably isolated and inserted into a replicable vector for further cloning (amplification of the DNA) or for expression. DNA encoding the antibody is readily isolated or synthesized using conventional procedures (e.g., by using oligonucleotide probes that are capable of binding specifically to DNAs encoding the heavy and light chains of the antibody). Many vectors are available. Exemplary vectors are described herein. The vector components generally include, but are not limited to, one or more of the following: a signal sequence, a sequence encoding an antibody of the present invention or fragment thereof (e.g., derived from the information provided herein), an enhancer element, a promoter, and a transcription termination sequence. The skilled artisan will be aware of suitable sequences for expression of an antibody. For example, exemplary signal sequences include prokaryotic secretion signals (e.g., alkaline phosphatase, penicillinase, Ipp, or heat-stable enterotoxin II), yeast secretion signals (e.g., invertase leader, a factor leader, or acid phosphatase leader), or mammalian secretion signals (e.g., herpes simplex gD signal). Exemplary promoters include those active in prokryotes (e.g., phoA promoter, β-lactamase and lactose promoter systems, alkaline phosphatase, a tryptophan (trp) promoter system, and hybrid promoters such as the tac promoter), and those active in mammalian cells (e.g., cytomegalovirus immediate early promoter (CMV), the human elongation factor 1-α promoter (EF1), the small nuclear RNA promoters (U1a and U1b), α-myosin heavy chain promoter, Simian virus 40 promoter (SV40), Rous sarcoma virus promoter (RSV), Adenovirus major late promoter, β-actin promoter; hybrid regulatory element comprising a CMV enhancer/β-actin promoter or an immunoglobulin promoter or active fragment thereof).

[0304] Suitable host cells for cloning or expressing the DNA in the vectors herein are the prokaryote, yeast, or higher eukaryote cells described above. Suitable prokaryotes for this purpose include eubacteria, such as Gram-negative or Gram-positive organisms, for example, Enterobacteriaceae such as Escherichia, e.g., E. coli, Enterobacter, Erwinia, Klebsiella, Proteus, Salmonella, e.g., Salmonella typhimurium, Serratia, e.g., Serratia marcescans, and Shigella, as well as Bacilli such as B. subtilis and B. licheniformis, Pseudomonas such as P. aeruginosa, and Streptomyces. One preferred E. coli cloning host is E. coli 294 (ATCC 31,446), although other strains such as E. coli B, E. coli X 1776 (ATCC 31,537), and E. coli W3110 (ATCC 27,325) are suitable. These examples are illustrative rather than limiting.

[0305] In addition to prokaryotes, eukaryotic microbes such as filamentous fungi or yeast are suitable cloning or expression hosts for antibody-encoding vectors. Saccharomyces cerevisiae, or common baker's yeast, is the most commonly used among lower eukaryotic host microorganisms. However, a number of other genera, species, and strains are commonly available and useful herein, such as Schizosaccharomyces pombe; Pichia pastoris (EP 183,070); and filamentous fungi such as, e.g., Neurospora, Penicillium, Tolypocladium, and Aspergillus hosts such as A. nidulans and A. niger.

[0306] Suitable host cells for the expression of glycosylated antibody are derived from multicellular organisms. Examples of invertebrate cells include plant and insect cells. Numerous baculoviral strains and variants and corresponding permissive insect host cells from hosts such as Spodoptera frugiperda (caterpillar), Aedes aegypti (mosquito), Aedes albopictus (mosquito), Drosophila melanogaster (fruitfly), and Bombyx mori have been identified.

[0307] Examples of useful mammalian host cell lines are monkey kidney CV1 line transformed by SV40 (COS-7, ATCC CRL 1651); human embryonic kidney line (293 or 293 cells subcloned for growth in suspension culture, Graham et al., (1977); baby hamster kidney cells (BHK, ATCC CCL 10); Chinese hamster ovary cells (CHO, Urlaub et al., (1980); mouse Sertoli cells (TM4, Mather (1980); monkey kidney cells (CV1 ATCC CCL 70); African green monkey kidney cells (VERO-76, ATCC CRL-1587); human cervical carcinoma cells (HELA, ATCC CCL 2); canine kidney cells (MDCK, ATCC CCL 34); buffalo rat liver cells (BRL 3A, ATCC CRL 1442); human lung cells (W138, ATCC CCL 75); human liver cells (Hep G2, HB 8065); mouse mammary tumor (MMT 060562, ATCC CCL51); TR1 cells (Mather et al., (1982); MRC 5 cells; FS4 cells; and PER.C6™ (Crucell NV).

[0308] The host cells used to produce the antibody of this invention may be cultured in a variety of media. Commercially available media such as Ham's F10 (Sigma), Minimal Essential Medium ((MEM), (Sigma), RPM1-1640 (Sigma), and Dulbecco's Modified Eagle's Medium ((DMEM), Sigma) are suitable for culturing the host cells. In addition, any of the media described in Ham et al., (1979), Barnes et al., (1980), U.S. Pat. No. 4,767,704; U.S. Pat. No. 4,657,866; U.S. Pat. No. 4,927,762; U.S. Pat. No. 4,560,655; U.S. Pat. No. 5,122,469; WO 90/03430; WO 87/00195; may be used as culture media for the host cells.

### Chimeric Antibodies

[0309] In one example an antibody of the invention is a chimeric antibody. The term “chimeric antibody” refers to antibodies in which a portion of the heavy and/or light chain is identical with or homologous to corresponding sequences in antibodies derived from a particular species (e.g., murine, such as mouse) or belonging to a particular antibody class or subclass, while the remainder of the chain(s) is identical with or homologous to corresponding sequences in antibodies derived from another species (e.g., primate, such as human) or belonging to another antibody class or subclass, as well as fragments of such antibodies, so long as they exhibit the desired biological activity (U.S. Pat. No. 4,816,567; and Morrison et al., 1984).

[0310] Typically chimeric antibodies utilize rodent or rabbit variable regions and human constant regions, in order to produce an antibody with predominantly human domains. For example, a chimeric antibody comprises a variable region from a mouse antibody as described herein according to any embodiment fused to a human constant region. The production of such chimeric antibodies is known in the art, and may be achieved by standard means (as described, e.g., in Morrison, (1985); Oi et al, (1986); Gillies et al, (1989); U.S. Pat. No. 5,807,715; U.S. Pat. No. 4,816,567 and U.S. Pat. No. 4,816,397).

[0311] The term “constant region” (CR) as used herein, refers to the portion of the antibody molecule which confers effector functions. The heavy chain constant region can be selected from any of the five isotypes: alpha, delta, epsilon, gamma or mu. Further, heavy chains of various subclasses (such as the IgG subclasses of heavy chains) are responsible for different effector functions and thus, by choosing the desired heavy chain constant region, antibodies with desired effector function can be produced. Preferred heavy chain constant regions are gamma 1 (IgG1), gamma 2 (IgG2), gamma 3 (IgG3) and gamma 4 (IgG4). Light chain constant regions can be of the kappa or lambda type, preferably of the kappa type.

[0312] As used herein, the term “complementarity determining regions” (syn. CDRs; i.e., CDR1, CDR2, and CDR3) refers to the amino acid residues of an antibody variable domain the presence of which are necessary for antigen binding. Each variable domain typically has three CDR regions identified as CDR1, CDR2 and CDR3. Each complementarity determining region may comprise amino acid residues from a “complementarity determining region” as defined by Kabat et al., (1991) and/or those residues from a “hypervariable loop” Chothia and Lesk (1987).

[0313] “Framework regions” (hereinafter FR) are those variable domain residues other than the CDR residues.

### Humanized and Human Antibodies

[0314] The antibodies of the present invention may be humanized antibodies or human antibodies.

[0315] The term “humanized antibody” shall be understood to refer to a chimeric molecule, generally prepared using recombinant techniques, having an epitope binding site derived from an immunoglobulin from a non-human species and the remaining immunoglobulin structure of the molecule based upon the structure and/or sequence of a human immunoglobulin. The antigen-binding site preferably comprises the complementarity determining regions (CDRs) from the non-human antibody grafted onto appropriate framework regions in the variable domains of a human antibody and the remaining regions from a human antibody. Antigen binding sites may be wild type or modified by one or more amino acid substitutions. Humanized forms of non-human (e.g., murine) antibodies are chimeric immunoglobulins, immunoglobulin chains or fragments thereof (such as Fv, Fab, Fab′, F(ab′)₂ or other antigen-binding subsequences of antibodies) which contain minimal sequence derived from non-human immunoglobulin. In some instances, Fv framework residues of the human immunoglobulin are replaced by corresponding non-human residues. Humanized antibodies may also comprise residues which are found neither in the recipient antibody nor in the imported CDR or framework sequences. In general, the humanized antibody will comprise substantially all of at least one, and typically two, variable domains, in which all or substantially all of the CDR regions correspond to those of a non-human immunoglobulin and all or substantially all of the FR regions are those of a human immunoglobulin consensus sequence. The humanized antibody optimally also will comprise at least a portion of an immunoglobulin constant region (Fc), typically that of a human immunoglobulin (Jones et al., 1989; Riechmann et al., 1988; and Presta 1992).

[0316] Methods for humanizing non-human antibodies are known in the art. Humanization can be essentially performed following the method of Jones et al., supra; Riechmann et al., supra; Verhoeyen et al., (1988), by substituting rodent CDRs or CDR sequences for the corresponding sequences of a human antibody. Other methods for humanizing an antibody are not excluded.

[0317] The term “human antibody” as used herein in connection with antibody molecules and binding proteins refers to antibodies having variable (e.g. VH, VL, CDR and FR regions) and constant antibody regions derived from or corresponding to sequences found in humans, e.g. in the human germline or somatic cells. The “human” antibodies can include amino acid residues not encoded by human sequences, e.g. mutations introduced by random or site directed mutations in vitro (in particular mutations which involve conservative substitutions or mutations in a small number of residues of the antibody, e.g. in 1, 2, 3, 4 or 5 of the residues of the antibody, preferably e.g. in 1, 2, 3, 4 or 5 of the residues making up one or more of the CDRs of the antibody). These “human antibodies” do not actually need to be produced by a human, rather, they can be produced using recombinant means and/or isolated from a transgenic animal (e.g., mouse) comprising nucleic acid encoding human antibody constant and/or variable regions (e.g., as described above).

[0318] Human antibodies can also be produced using various techniques known in the art, including phage display libraries (e.g., as described in Hoogenboom and Winter 1991; Marks et al., 1991; U.S. Pat. No. 5,885,793).

[0319] Completely human antibodies which recognize a selected epitope can also be generated using a technique referred to as “guided selection.” In this approach a selected non-human monoclonal antibody, e.g., a mouse antibody, is used to guide the selection of a completely human antibody recognizing the same epitope (Jespers et al, 1988).

### Multi-Specific Antibodies

[0320] Bispecific antibodies are antibodies that have binding specificities for at least two different epitopes. Exemplary bispecific antibodies may bind to two different epitopes of the target protein. Other such antibodies may combine a binding site for a protein described herein with a binding site for another protein. Alternatively, a region that binds a protein described herein may be combined with a region which binds to a triggering molecule on a leukocyte such as a T-cell receptor molecule (e.g., CD3), or Fc receptors for IgG (FcγR), such as FcγRI (CD64), FcγRII (CD32) and/or FcγRIII (CD16), so as to focus and localize cellular defense mechanisms to a Treg cell. Bispecific antibodies may also be used to localize cytotoxic agents to Treg cells. These antibodies possess a target protein-binding region and a region which binds the cytotoxic agent (e.g., saporin, anti-interferon-α, vinca alkaloid, ricin A chain, methotrexate or radioactive isotope hapten). Bispecific antibodies can be prepared as full length antibodies or antibody fragments (e.g., F(ab′)2 bispecific antibodies). Exemplary bispecific antibodies and their method for production are described, in WO96/16673, WO98/02463 and U.S. Pat. No. 5,821,337.

[0321] Methods for making bispecific antibodies are known in the art. Traditional production of full length bispecific antibodies is based on the co-expression of two immunoglobulin heavy chain-light chain pairs, where the two chains have different specificities (Millstein et al, 1983). Because of the random assortment of immunoglobulin heavy and light chains, these hybridomas (quadromas) produce a potential mixture of 10 different antibody molecules, of which only one has the correct bispecific structure. Purification of the correct molecule is usually done by affinity chromatography steps. Similar procedures are disclosed in WO93/08829, and in Traunecker et al., (1991). Other approaches for producing bispecific antibodies are known in the art and described for example, in WO94/04690; U.S. Pat. No. 5,731,168; Suresh et al, (1986).

[0322] Bispecific antibodies include cross-linked or “heteroconjugate” antibodies. For example, one of the antibodies in the heteroconjugate can be coupled to avidin, the other to biotin. Such antibodies are known in the art and described, for example, in U.S. Pat. No. 4,676,980; WO91/00360; WO92/200373; and EP03089.

[0323] Techniques for generating bispecific antibodies from antibody fragments have also been described in the literature. For example, bispecific antibodies can be prepared using chemical linkage (Brennan et al, 1985) or using Fab′-SH fragments from E. coli, which can be chemically coupled to form bispecific antibodies (Shalaby et al, 1992). Other techniques make use of leucine zippers (Kostelny et al, 1992) or the “diabody” technology described by Hollinger et al, (1993).

[0324] Antibodies with more than two valencies are also contemplated by the present invention. For example, trispecific antibodies can be prepared (Tutt et al, (1991).

[0325] The antibodies of the present invention can be multivalent antibodies (which are other than of the IgM class) with three or more antigen binding sites (e.g., tetravalent antibodies), which can be readily produced by recombinant expression of nucleic acid encoding the polypeptide chains of the antibody. The multivalent antibody can comprise a dimerization domain and three or more antigen binding sites. The preferred dimerization domain comprises (or consists of) an Fc region or a hinge region. In this scenario, the antibody can comprise an Fc region and three or more antigen binding sites amino-terminal to the Fc region.

### Mutations to Antibodies

[0326] Amino acid sequence modification(s) of the antibodies described herein are encompassed by the present invention. For example, it may be desirable to improve the binding affinity and/or other biological properties of the antibody. Amino acid sequence variants of the antibody are prepared by introducing appropriate nucleotide changes into the encoding nucleic acid, or by peptide synthesis. Such modifications include, for example, deletions from, and/or insertions into and/or substitutions of, residues within the amino acid sequences of the antibody. Any combination of deletion, insertion, and substitution is made to arrive at the final construct, provided that the final construct possesses the desired characteristics. The amino acid changes also may alter post-translational processes of the antibody, such as changing the number or position of glycosylation sites.

[0327] Amino acid sequence insertions include amino- and/or carboxyl-terminal fusions ranging in length from one residue to polypeptides containing a hundred or more residues, as well as intrasequence insertions of single or multiple amino acid residues. Examples of terminal insertions include an antibody, with an N-terminal methionyl residue or the antibody fused to a cytotoxic polypeptide. Other insertional variants of the antibody include the fusion to the N- or C-terminus of the antibody to an enzyme or a polypeptide which increases the serum half-life of the antibody.

[0328] Another type of variant is an amino acid substitution variant. These variants have at least one amino acid residue in the antibody replaced by a different residue. The sites of interest for substitutional mutagenesis include the CDRs, however FR alterations are also contemplated. Preferred substitutions are conservative substitutions.

[0329] Any cysteine residue not involved in maintaining the proper conformation of the antibody also may be substituted, generally with serine, to improve the oxidative stability of the molecule and prevent aberrant crosslinking. Conversely, cysteine bond(s) may be added to the antibody to improve its stability (particularly where the antibody is an antibody fragment such as an Fv fragment).

[0330] A particularly preferred type of substitutional variant involves substituting one or more CDR residues of a parent antibody (e.g., a humanized or human antibody). Generally, the resulting variant(s) selected for further development will have improved biological properties relative to the parent antibody from which they are generated. A convenient way for generating such substitutional variants involves affinity maturation using phage display e.g., as described in U.S. Pat. No. 5,223,409.

[0331] Another type of amino acid variant of the antibody alters the original glycosylation pattern of the antibody. By altering is meant deleting one or more carbohydrate moieties found in the antibody, and/or adding one or more glycosylation sites that are not present in the antibody. Modified glycoforms of antibodies may be useful for a variety of purposes, including but not limited to enhancing or reducing effector function and/or modifying half life of the antibody (see, for example, WO2007/010401). Such alterations may result in a decrease or increase of CIq binding and CDC or of FcγR binding and/or ADCC. Substitutions can, for example, be made in one or more of the amino acid residues of the heavy chain constant region thereby causing an alteration in an effector function while retaining the ability to bind to the antigen as compared with the modified antibody, e.g., as described in U.S. Pat. No. 5,624,821 and U.S. Pat. No. 5,648,260. Engineered glycoforms may be generated by any method known to one skilled in the art, for example by using engineered or variant expression strains, by co-expression with one or more enzymes, for example β(1,4)—N-acetylglucosaminyltransferase III (GnTIII), by expressing an antibody or fragment thereof in various organisms or cell lines from various organisms, or by modifying carbohydrate(s) after the antibody or fragment has been expressed. Methods for generating engineered glycoforms are known in the art, and include but are not limited to those described in Umana et al, 1999; Davies et al., 2007; Shields et al, 2002; Shinkawa et al., 2003) U.S. Pat. No. 6,602,684; U.S. Ser. No. 10/277,370; U.S. Ser. No. 10/113,929; WO00/61739; WO01/292246; WO02/311140; WO02/30954; WO00/061739; EP01229125; US20030115614; Okazaki et al., 2004.

[0332] Alternatively, or in addition, the antibodies or fragments can be expressed in a transfectoma which does not add the fucose unit normally attached to Asn at position 297 of the Fc region in order to enhance the affinity of the Fc region for Fc-Receptors which, in turn, will result in an increased ADCC of the antibodies in the presence of NK cells, e.g., Shield et al., 2002.

[0333] To increase the serum half life of the antibody, one may incorporate a salvage receptor binding epitope into the antibody (especially an antibody fragment) as described in U.S. Pat. No. 5,739,277. As used herein, the term “salvage receptor binding epitope” refers to an epitope of the Fc region of an IgG molecule (e.g., IgG1, IgG2, IgG3, or IgG4) that is responsible for increasing the in vivo serum half-life of the IgG molecule.

### Purification of Antibodies

[0334] When using recombinant techniques, the antibody can be produced intracellularly, in the periplasmic space, or directly secreted into the medium. If the antibody is produced intracellularly, as a first step, the particulate debris, either host cells or lysed fragments, is removed, for example, by centrifugation or ultrafiltration. Where the antibody is secreted into the medium, supernatants from such expression systems are generally first concentrated using a commercially available protein concentration filter, for example, an Amicon or Millipore Pellicon ultrafiltration unit. A protease inhibitor such as PMSF may be included in any of the foregoing steps to inhibit proteolysis and antibiotics may be included to prevent the growth of adventitious contaminants.

[0335] The antibody prepared from the cells can be purified using, for example, hydroxyl apatite chromatography, gel electrophoresis, dialysis, and affinity chromatography, with affinity chromatography being the preferred purification technique. The suitability of protein A as an affinity ligand depends on the species and isotype of any immunoglobulin Fc domain that is present in the antibody. Protein A can be used to purify antibodies that are based on human γ1, γ2, or γ4 heavy chains (Lindmark et al., 1983). Protein G is recommended for all mouse isotypes and for human γ3 (Guss et al., 1986). The matrix to which the affinity ligand is attached is most often agarose, but other matrices are available. Mechanically stable matrices such as controlled pore glass or poly(styrenedivinyl)benzene allow for faster flow rates and shorter processing times than can be achieved with agarose. Other techniques for protein purification such as fractionation on an ion-exchange column, ethanol precipitation, Reverse Phase HPLC, chromatography on silica, chromatography on heparin SEPHAROSE™ chromatography on an anion or cation exchange resin (such as a polyaspartic acid column), chromatofocusing, SDS-PAGE, and ammonium sulfate precipitation are also available depending on the antibody to be recovered. Exemplary purification methods are described, for example, in Zola (1987).

[0336] Following any preliminary purification step(s), the mixture comprising the antibody of interest and contaminants may be subjected to low pH hydrophobic interaction chromatography.

### Protein Conjugates

[0337] The present invention also provides derivatives of an antibody or protein as described herein according to any embodiment, e.g., a conjugate (immunoconjugate) comprising an antibody or protein of the present invention conjugated to a distinct moiety, e.g., a therapeutic agent or a detectable agent which is directly or indirectly bound to the antibody. Examples of other moieties include, but are not limited to, a cytotoxin, a radioisotope (e.g., ²¹²Bi, ¹³¹I, ⁹⁰Y, or ¹⁸⁶Re) an immunomodulatory agent, an anti-angiogenic agent, an anti-neovascularization and/or other vascularization agent, a toxin, an anti-proliferative agent, a pro-apoptotic agent, a chemotherapeutic agent and a therapeutic nucleic acid.

[0338] A cytotoxin includes any agent that is detrimental to (e.g., kills) cells. For a description of these classes of drugs which are known in the art, and their mechanisms of action, see Goodman et al., 1990. Additional techniques relevant to the preparation of antibody immunotoxins are provided in for instance U.S. Pat. No. 5,194,594. Exemplary toxins include diphtheria A chain, nonbinding active fragments of diphtheria toxin, exotoxin A chain (from Pseudomonas aeruginosa), ricin A chain, abrin A chain, modeccin A chain, alpha-sarcin, Aleurites fordii proteins, dianthin proteins, Phytolaca americana proteins (PAPI, PAPII, and PAP-S), momordica charantia inhibitor, curcin, crotin, sapaonaria officinalis inhibitor, gelonin, mitogellin, restrictocin, phenomycin, enomycin and the tricothecenes. See, for example, WO93/21232.

[0339] Suitable therapeutic agents for forming immunoconjugates of the present invention include taxol, cytochalasin B, gramicidin D, ethidium bromide, emetine, mitomycin, etoposide, tenoposide, vincristine, vinblastine, colchicin, doxorubicin, daunorubicin, dihydroxy anthracin dione, mitoxantrone, mithramycin, actinomycin D, 1-dehydrotestosterone, glucocorticoids, procaine, tetracaine, lidocaine, propranolol, and puromycin, antimetabolites (such as methotrexate, 6-mercaptopurine, 6-thioguanine, cytarabine, fludarabin, 5-fluorouracil, decarbazine, hydroxyurea, asparaginase, gemcitabine, cladribine), alkylating agents (such as mechlorethamine, thioepa, chlorambucil, melphalan, carmustine (BSNU), lomustine (CCNU), cyclophosphamide, busulfan, dibromomannitol, streptozotocin, dacarbazine (DTIC), procarbazine, mitomycin C, cisplatin and other platinum derivatives, such as carboplatin), antibiotics (such as dactinomycin (formerly actinomycin), bleomycin, daunorubicin (formerly daunomycin), doxorubicin, idarubicin, mithramycin, mitomycin, mitoxantrone, plicamycin, anthramycin (AMC)).

[0340] In another embodiment, the antibody may be conjugated to a “receptor” (such as streptavidin) for utilization in Treg cell pretargeting wherein the antibody-receptor conjugate is administered to the patient, followed by removal of unbound conjugate from the circulation using a clearing agent and then administration of a “ligand” (e.g., avidin) that is conjugated to a therapeutic agent (e.g., a radionucleotide).

[0341] The antibodies of the present invention can be further modified to contain additional nonproteinaceous moieties that are known in the art and readily available. Preferably, the moieties suitable for derivatization of the antibody are water soluble polymers. Non-limiting examples of water soluble polymers include, but are not limited to, polyethylene glycol (PEG), copolymers of ethylene glycol/propylene glycol, carboxymethylcellulose, dextran or polyvinyl alcohol.

[0342] In one example, a compound as described herein according to any embodiment comprises one or more detectable markers to facilitate detection and/or isolation. For example, the compound comprises a fluorescent label such as, for example, fluorescein (FITC), 5,6-carboxymethyl fluorescein, Texas red, nitrobenz-2-oxa-1,3-diazol-4-yl (NBD), coumarin, dansyl chloride, rhodamine, 4′-6-diamidino-2-phenylinodole (DAPI), and the cyanine dyes Cy3, Cy3.5, Cy5, Cy5.5 and Cy7, fluorescein (5-carboxyfluorescein-N-hydroxysuccinimide ester), rhodamine (5,6-tetramethyl rhodamine). The absorption and emission maxima, respectively, for these fluors are: FITC (490 nm; 520 nm), Cy3 (554 nm; 568 nm), Cy3.5 (581 nm; 588 nm), Cy5 (652 nm: 672 nm), Cy5.5 (682 nm; 703 nm) and Cy7 (755 nm; 778 nm).

[0343] Alternatively, or in addition, the compound that binds to a protein or cell surface marker as described herein according to any embodiment is labeled with, for example, a fluorescent semiconductor nanocrystal (as described, for example, in U.S. Pat. No. 6,306,610).

[0344] Alternatively, or in addition, the compound is labeled with, for example, a magnetic or paramagnetic compound, such as, iron, steel, nickel, cobalt, rare earth materials, neodymium-iron-boron, ferrous-chromium-cobalt, nickel-ferrous, cobalt-platinum, or strontium ferrite.

### Peptides or Polypeptides

[0345] In another embodiment, the compound that binds to a protein as described herein according to any embodiment is a peptide. For example, the peptide is derived from a ligand of a cell surface marker or protein as described herein according to any embodiment (e.g., from a ligand binding region of the protein or marker). Other peptides or poplypeptides include, for example, T cell receptors.

[0346] Alternatively, a ligand is a peptide isolated from a random peptide library. To identify a suitable ligand, a random peptide library is generated and screened as described in U.S. Pat. No. 5,733,731, U.S. Pat. No. 5,591,646 and U.S. Pat. No. 5,834,318. Generally, such libraries are generated from short random oligonucleotides that are expressed either in vitro or in vivo and displayed in such a way to facilitate screening of the library to identify a peptide that. is capable of specifically binding to a protein or peptide of interest. Methods of display include, phage display, retroviral display, bacterial surface display, bacterial flagellar display, bacterial spore display, yeast surface display, mammalian surface display, and methods of in vitro display including, mRNA display, ribosome display and covalent display.

[0347] A peptide that is capable of binding a protein or peptide of interest is identified by a number of methods known in the art, such as, for example, standard affinity purification methods as described, for example in Scopes, 1994) purification using FACS analysis as described in U.S. Pat. No. 6,455,63, or purification using biosensor technology as described in Gilligan et al, 2002.

[0348] In another example, a peptide or polypeptide is a ligand of a protein as described herein according to any embodiment. For example, a ligand for PI16 is prostate secretory protein (PSP) 94 (e.g., as described in U.S. Pat. No. 5,428,011). A ligand for PKD1L3 includes an acid (e.g., acetic acid) or a domain of PKD2L1 that interacts with PKD1L3. Ligands for PTPRB include contactin, tenascin C or an extracellular domain of VE-cadherin. A ligand for RGMB includes bone morphogenetic protein (BMP) 2 or BMP4. A ligand for AQP3 is, for example, syntaxin 4. Ligands for CD49f include tetraspanin or laminin. A ligand for LSR is, for example, receptor-associated protein (RAP).

[0349] Peptides or polypeptides can be labeled or conjugated as described herein according to any embodiment. Such labeling or conjugation permits detection, isolation or killing Treg cells.

### Small Molecules

[0350] A chemical small molecule library is also clearly contemplated for the identification of ligands that specifically bind to a protein or cell surface marker as described herein according to any embodiment. Chemical small molecule libraries are available commercially or alternatively may be generated using methods known in the art, such as, for example, those described in U.S. Pat. No. 5,463,564.

### Nucleic Acid Detection/Therapeutic Reagents

### Probe/Primer Design and Production

[0351] As will be apparent to the skilled artisan, the specific probe or primer used in an assay of the present invention will depend upon the assay format used. Clearly, a probe or primer that is capable of specifically hybridizing to or detecting the marker of interest is preferred. Methods for designing probes and/or primers for, for example, PCR or hybridization are known in the art and described, for example, in Dieffenbach and Dveksler, 1995. Furthermore, several software packages are publicly available that design optimal probes and/or primers for a variety of assays, e.g. Primer 3 available from the Center for Genome Research, Cambridge, Mass., USA. Probes and/or primers useful for detection of a marker associated Treg cells are assessed to determine those that do not form hairpins, self-prime or form primer dimers (e.g. with another probe, or primer used in a detection assay).

[0352] Furthermore, a probe or primer (or the sequence thereof) is assessed to determine the temperature at which it denatures from a target nucleic acid (i.e. the melting temperature of the probe or primer, or Tm). Methods of determining Tm are known in the art and described, for example, in Santa Lucia, 1995 or Bresslauer et al., 1986.

[0353] Methods for producing/synthesizing a probe or primer of the present invention are known in the art. For example, oligonucleotide synthesis is described, in Gait, 1984. For example, a probe or primer may be obtained by biological synthesis (e.g. by digestion of a nucleic acid with a restriction endonuclease) or by chemical synthesis. For short sequences (up to about 100 nucleotides) chemical synthesis is preferable.

[0354] For longer sequences standard replication methods employed in molecular biology are useful, such as, for example, the use of M13 for single stranded DNA as described by Messing, 1983.

[0355] Other methods for oligonucleotide synthesis include, for example, phosphotriester and phosphodiester methods (Narang, et al., 1979) and synthesis on a support (Beaucage, et al, 1981) as well as phosphoramidate technique, Caruthers, et al., (1988), and others described in Narang (1987), and the references contained therein.

[0356] LNA synthesis is described, for example, in Nielsen et al, (1997); Singh and Wengel, (1998). PNA synthesis is described, for example, in Egholm et al., (1992); Egholm et al., (1993); and Orum et al., (1993).

[0357] In one embodiment, a probe or primer useful for performance of the method of the invention comprises a nucleotide sequence comprising at least about 20 consecutive nucleotides of a nucleic set forth in any one of Tables 2-6.

[0358] The present invention additionally contemplates the use a probe or primer produced according to the methods described herein in the manufacture of a diagnostic reagent for diagnosing or determining a predisposition to a Treg-associated condition.

### Expression of Polynucleotides

[0359] In one example of the present invention, a Treg-associated condition is treated by increasing the expression of a nucleic acid set forth in any one or more of Tables 3 or 5. For example, the level of expression is increased by administering to a cell a nucleic acid set forth in any one of Tables 3 or 5 or a biologically active mutant, homolog or fragment thereof. Preferably, the nucleic acid is operably linked to a promoter to induce expression thereof in the cell, e.g., the nucleic acid is ligated into or cloned into an expression vector.

[0360] As used herein, the term “promoter” is to be taken in its broadest context and includes the transcriptional regulatory sequences of a genomic gene, including the TATA box or initiator element, which is required for transcription initiation, with or without additional regulatory elements (i.e., upstream activating sequences, transcription factor binding sites, enhancers and silencers) which alter gene expression, e.g., in response to developmental and/or external stimuli, or in a tissue specific manner. In the present context, the term “promoter” is also used to describe a recombinant, synthetic or fusion molecule, or derivative which confers, activates or enhances the expression of a nucleic acid to which it is operably linked, and which encodes the peptide or protein. Preferred promoters can contain additional copies of one or more specific regulatory elements to further enhance expression and/or alter the spatial expression and/or temporal expression of said nucleic acid molecule.

[0361] Placing a nucleic acid under the regulatory control of, i.e., “operably linking”, a promoter means positioning said molecule such that expression is controlled by the promoter sequence, generally by positioning the promoter 5′ (upstream) of the polypeptide-encoding sequence.

[0362] The term “expression vector” refers to a plasmid, virus, artificial chromosome, cosmid or other vehicle known in the art that has been manipulated by insertion or incorporation of the nucleic acid as described herein in any embodiment. Such expression vectors contain a promoter which facilitates the efficient transcription in the host of the inserted genetic sequence. The expression vector typically contains an origin of replication, a promoter, as well as specific genes which allow phenotypic selection of the transformed cells. Exemplary vectors and promoters are known in the art and/or described above.

[0363] Preferred viral vectors are derived from adeno-associated virus (AAV) and comprise a constitutive or regulatable promoter capable of driving sufficient levels of expression of the nucleic acid in the viral vector. Preferably, the viral vector comprises inverted terminal repeat sequences of AAV, such as those described in WO93/24641. In a preferred embodiment, the viral vector comprises polynucleotide sequences of the pTR-UF5 plasmid. The pTR-UF5 plasmid is a modified version of the pTR_{BS}-UF/UF1/UF2/UFB series of plasmids (Zolotukiin et al., 1996; Klein et al., 1998). Nonlimiting examples of additional viral vectors useful according to this aspect of the invention include lentivirus vectors, herpes simplex virus vectors, adenovirus vectors, adeno-associated virus vectors, various suitable retroviral vectors, pseudorabies virus vectors, alpha-herpes virus vectors, HIV-derived vectors, other neurotropic viral vectors and the like.

[0364] An exemplary viral vector system useful for delivery of a nucleic acid of the present invention is an adeno-associated virus (AAV) (e.g., as described in Hermonat et al., (1984); Tratschin et al., (1985); Wondisford et al., (1988); Tratschin et al., (1984); Flotte et al, (1993); U.S. Pat. No. 4,797,368; U.S. Pat. No. 5,139,941; U.S. Pat. No. 5,173,414; U.S. Pat. No. 5,252,479; or U.S. Pat. No. 5,354,678). An adenovirus (e.g., as described in Berkner et al., 1988; Rosenfeld et al., 1991; Rosenfeld et al., 1992 WO94/28938, WO96/13597 and WO96/26285, and references cited therein).

[0365] Several non-viral methods for the transfer of nucleic acid into mammalian cells are also encompassed by the present invention. These include calcium phosphate precipitation (Graham and Van Der Eb, 1973; Chen and Okayama, 1987; Rippe et al., DEAE-dextran (Gopal, 1985), electroporation (Tur-Kaspa et al., 1986), direct microinjection, DNA-loaded liposomes (Nicolau and Sene, 1982; Fraley et al., 1979), cell sonication (Fecheimer et al., 1987), gene bombardment using high velocity microprojectiles (Yang et al., 1990), receptor-mediated transfection (Wu and Wu, 1987). In other embodiments, transfer of nucleic acids into cells may be accomplished by formulating the nucleic acids with nanocaps (e.g., nanoparticulate CaP04), colloidal gold, nanoparticulate synthetic polymers, and/or liposomes.

### Inhibition of Nucleic Acid Transcription/Translation

[0366] In one embodiment, therapeutic and/or prophylactic methods as described herein according to any embodiment involve reducing expression of any one or more nucleic acids set forth in any one or more of Tables 2, 4 or 5. Preferably, such a method involves administering a compound that reduces transcription and/or translation of any one or more nucleic acids set forth in any one or more of Tables 2, 4 or 5. In one example, the compound is a nucleic acid, e.g., an antisense polynucleotide, a ribozyme, a PNA, an interfering RNA, a siRNA, short hairpin RNA a microRNA

### Antisense Polynucleotides

[0367] The term “antisense polynucleotide” shall be taken to mean a DNA or RNA, or combination thereof that is complementary to at least a portion of a specific mRNA molecule encoding a polypeptide as described herein in any embodiment and capable of interfering with a post-transcriptional event such as mRNA translation. The use of antisense methods is known in the art (see for example, Hartmann and Endres, 1999).

[0368] An antisense polynucleotide of the invention will hybridize to a target polynucleotide under physiological conditions. Antisense polynucleotides include sequences that correspond to the structural genes or for sequences that effect control over gene expression or splicing. For example, the antisense polynucleotide may correspond to the targeted coding region of the genes of the invention, or the 5′-untranslated region (UTR) or the 3′-UTR or combination of these. It may be complementary in part to intron sequences, which may be spliced out during or after transcription, preferably only to exon sequences of the target gene. The length of the antisense sequence should be at least 19 contiguous nucleotides, preferably at least 50 nucleotides, and more preferably at least 100, 200, 500 or 1000 nucleotides of a nucleic acid set forth in any one or more of Tables 2, 4 or 5 or a structural gene encoding same. The full-length sequence complementary to the entire gene transcript may be used. The length is most preferably 100-2000 nucleotides. The degree of identity of the antisense sequence to the targeted transcript should be at least 90% and more preferably 95-100%.

### Catalytic Polynucleotides

[0369] The term “catalytic polynucleotide/nucleic acid” refers to a DNA molecule or DNA-containing molecule (also known in the art as a “deoxyribozyme” or “DNAzyme”) or an RNA or RNA-containing molecule (also known as a “ribozyme” or “RNAzyme”) which specifically recognizes a distinct substrate and catalyses the chemical modification of this substrate. The nucleic acid bases in the catalytic nucleic acid can be bases A, C, G, T (and U for RNA).

[0370] Typically, the catalytic nucleic acid contains an antisense sequence for specific recognition of a target nucleic acid, and a nucleic acid cleaving enzymatic activity (also referred to herein as the “catalytic domain”). The types of ribozymes that are particularly useful in this invention are a hammerhead ribozyme (Haseloff and Gerlach, 1988; Perriman et al., 1992) and a hairpin ribozyme (Zolotukiin et al., 1996; Klein et al., 1998; Shippy et al., 1999).

### RNA Interference

[0371] RNA interference (RNAi) is useful for specifically inhibiting the production of a particular protein. Although not wishing to be limited by theory, Waterhouse et al., (1998) have provided a model for the mechanism by which dsRNA (duplex RNA) can be used to reduce protein production. This technology relies on the presence of dsRNA molecules that contain a sequence that is essentially identical to the mRNA of the gene of interest or part thereof, in this case an mRNA encoding a protein set forth in any one or more of Tables 2, 4 or 5. Conveniently, the dsRNA can be produced from a single promoter in a recombinant vector or host cell, where the sense and anti-sense sequences are flanked by an unrelated sequence which enables the sense and anti-sense sequences to hybridize to form the dsRNA molecule with the unrelated sequence forming a loop structure. The design and production of suitable dsRNA molecules for the present invention is well within the capacity of a person skilled in the art, particularly considering Waterhouse et al., (1998), Smith et al., (2000), WO99/32619, WO99/53050, WO99/49029, and WO01/34815.

[0372] The length of the sense and antisense sequences that hybridize should each be at least 19 contiguous nucleotides, preferably at least 30 or 50 nucleotides, and more preferably at least 100, 200, 500 or 1000 nucleotides. The full-length sequence corresponding to the entire gene transcript may be used. The lengths are most preferably 100-2000 nucleotides. The degree of identity of the sense and antisense sequences to the targeted transcript should be at least 85%, preferably at least 90% and more preferably 95-100%.

[0373] Preferred small interfering RNA (“siRNA”) molecules comprise a nucleotide sequence that is identical to about 19-23 contiguous nucleotides of the target mRNA. Preferably, the siRNA sequence commences with the dinucleotide AA, comprises a GC-content of about 30-70% (preferably, 30-60%, more preferably 40-60% and more preferably about 45%-55%), and does not have a high percentage identity to any nucleotide sequence other than the target in the genome of the mammal in which it is to be introduced, for example as determined by standard BLAST search.

### Labeled Compounds

[0374] In one embodiment, a compound as described herein according to any embodiment comprises one or more detectable markers to facilitate detection and/or isolation. For example, the compound comprises a fluorescent label such as, for example, fluorescein (FITC), 5,6-carboxymethyl fluorescein, Texas red, nitrobenz-2-oxa-1,3-diazol-4-yl (NBD), coumarin, dansyl chloride, rhodamine, 4′-6-diamidino-2-phenylinodole (DAPI), and the cyanine dyes Cy3, Cy3.5, Cy5, Cy5.5 and Cy7, fluorescein (5-carboxyfluorescein-N-hydroxysuccinimide ester), rhodamine (5,6-tetramethyl rhodamine). The absorption and emission maxima, respectively, for these fluors are: FITC (490 nm; 520 nm), Cy3 (554 nm; 568 nm), Cy3.5 (581 nm; 588 nm), Cy5 (652 nm: 672 nm), Cy5.5 (682 nm; 703 nm) and Cy7 (755 nm; 778 nm).

[0375] Alternatively, or in addition, the compound that binds to a protein or cell surface marker as described herein according to any embodiment is labeled with, for example, a fluorescent semiconductor nanocrystal (as described, for example, in U.S. Pat. No. 6,306,610).

[0376] Alternatively, or in addition, the compound is labeled with, for example, a magnetic or paramagnetic compound, such as, iron, steel, nickel, cobalt, rare earth materials, neodymium-iron-boron, ferrous-chromium-cobalt, nickel-ferrous, cobalt-platinum, or strontium ferrite.

### Pharmaceutical Compositions

[0377] The therapeutic and/or prophylactic compounds of the present invention (syn. active ingredients) are useful for parenteral, topical, oral, or local administration, aerosol administration, or transdermal administration, for prophylactic or for therapeutic treatment. The pharmaceutical compositions can be administered in a variety of unit dosage forms depending upon the method of administration. For example, unit dosage forms suitable for oral administration include powder, tablets, pills, capsules and lozenges. It is recognized that the pharmaceutical compositions of this invention, when administered orally, must be protected from digestion. This is typically accomplished either by complexing the compound with a composition to render it resistant to acidic and enzymatic hydrolysis or by packaging the compound in an appropriately resistant carrier such as a liposome. Means of protecting proteins from digestion are known in the art.

[0378] The pharmaceutical compositions of this invention are particularly useful for parenteral administration, such as intravenous administration or administration into a body cavity or lumen of an organ or joint. The compositions for administration will commonly comprise a solution of the compound of the present invention dissolved in a pharmaceutically acceptable carrier, preferably an aqueous carrier. A variety of aqueous carriers can be used, e.g., buffered saline and the like. The compositions may contain pharmaceutically acceptable auxiliary substances as required to approximate physiological conditions such as pH adjusting and buffering agents, toxicity adjusting agents and the like, for example, sodium acetate, sodium chloride, potassium chloride, calcium chloride, sodium lactate and the like. The concentration of compounds of the present invention in these formulations can vary widely, and will be selected primarily based on fluid volumes, viscosities, body weight and the like in accordance with the particular mode of administration selected and the patient's needs. Exemplary carriers include water, saline, Ringer's solution, dextrose solution, and 5% human serum albumin. Nonaqueous vehicles such as mixed oils and ethyl oleate may also be used. Liposomes may also be used as carriers. The vehicles may contain minor amounts of additives that enhance isotonicity and chemical stability, e.g., buffers and preservatives.

[0379] The compounds of the present invention can be formulated for parenteral administration, e.g., formulated for injection via the intravenous, intramuscular, sub-cutaneous, transdermal, or other such routes, including peristaltic administration and direct instillation into a tumor or disease site (intracavity administration). The preparation of an aqueous composition that contains the compounds of the present invention as an active ingredient will be known to those of skill in the art.

[0380] Suitable pharmaceutical compositions in accordance with the invention will generally include an amount of the compounds of the present invention admixed with an acceptable pharmaceutical diluent or excipient, such as a sterile aqueous solution, to give a range of final concentrations, depending on the intended use. The techniques of preparation are generally known in the art as exemplified by Remington's Pharmaceutical Sciences, 16th Ed. Mack Publishing Company, 1980, incorporated herein by reference.

[0381] Upon formulation, compounds of the present invention will be administered in a manner compatible with the dosage formulation and in such amount as is therapeutically/prophylactically effective. Formulations are easily administered in a variety of dosage forms, such as the type of injectable solutions described above, but other pharmaceutically acceptable forms are also contemplated, e.g., tablets, pills, capsules or other solids for oral administration, suppositories, pessaries, nasal solutions or sprays, aerosols, inhalants, liposomal forms and the like. Pharmaceutical “slow release” capsules or compositions may also be used. Slow release formulations are generally designed to give a constant drug level over an extended period and may be used to deliver compounds of the present invention.

[0382] WO2002/080967 describes compositions and methods for administering aerosolized compositions comprising antibodies for the treatment of, e.g., asthma, which are also suitable for administration of an antibody of the present invention.

[0383] Suitable dosages of compounds of the present invention will vary depending on the specific compound, the condition to be treated and/or the subject being treated. It is within the ability of a skilled physician to determine a suitable dosage, e.g., by commencing with a sub-optimal dosage and incrementally modifying the dosage to determine an optimal or useful dosage. Alternatively, to determine an appropriate dosage for treatment/prophylaxis, data from the cell culture assays or animal studies are used, wherein a suitable dose is within a range of circulating concentrations that include the ED50 of the active compound with little or no toxicity. The dosage may vary within this range depending upon the dosage form employed and the route of administration utilized. A therapeutically/prophylactically effective dose can be estimated initially from cell culture assays. A dose may be formulated in animal models to achieve a circulating plasma concentration range that includes the IC50 (i.e., the concentration of the compound which achieves a half-maximal inhibition of symptoms) as determined in cell culture. Such information can be used to more accurately determine useful doses in humans. Levels in plasma maybe measured, for example, by high performance liquid chromatography.

### Cellular Compositions

[0384] In one embodiment of the present invention Treg cells and/or progeny cells thereof are administered in the form of a composition. Preferably, such a composition comprises a pharmaceutically acceptable carrier and/or excipient.

[0385] Suitable carriers for this invention include those conventionally used, e.g., water, saline, aqueous dextrose, lactose, Ringer's solution, a buffered solution, hyaluronan and glycols are preferred liquid carriers, particularly (when isotonic) for solutions. Suitable pharmaceutical carriers and excipients include starch, cellulose, glucose, lactose, sucrose, gelatin, malt, rice, flour, chalk, silica gel, magnesium stearate, sodium stearate, glycerol monostearate, sodium chloride, glycerol, propylene glycol, water, ethanol, and the like.

[0386] In another example, a carrier is a media composition, e.g., in which a cell is grown or suspended. Preferably, such a media composition does not induce any adverse effects in a subject to whom it is administered.

[0387] Preferred carriers and excipients do not adversely affect the viability of a cell and/or the ability of a cell to reduce, prevent or delay a Treg-associated condition.

[0388] In one example, the carrier or excipient provides a buffering activity to maintain the cells and/or soluble factors at a suitable pH to thereby exert a biological activity, e.g., the carrier or excipient is phosphate buffered saline (PBS). PBS represents an attractive carrier or excipient because it interacts with cells and factors minimally and permits rapid release of the cells and factors, in such a case, the composition of the invention may be produced as a liquid for direct application to the blood stream or into a tissue or a region surrounding or adjacent to a tissue, e.g., by injection.

[0389] Treg cells and/or progeny cells thereof can also be incorporated or embedded within scaffolds that are recipient-compatible and which degrade into products that are not harmful to the recipient. These scaffolds provide support and protection for cells that are to be transplanted into the recipient subjects. Natural and/or synthetic biodegradable scaffolds are examples of such scaffolds. Other suitable scaffolds include polyglycolic acid scaffolds, e.g., as described by Vacanti, et al., 1988; Cima, et al., 1991; Vacanti, et al., 1991; or synthetic polymers such as polyanhydrides, polyorthoesters, and polylactic acid.

[0390] Preferably, the composition comprises an effective amount or a therapeutically or prophylactically effective amount of cells. For example, the composition comprises about 1×10⁵ Treg cells/kg to about 1×10⁹ Treg cells/kg or about 1×10⁶ Treg cells/kg to about 1×10⁸ Treg cells/kg or about 1×10⁶ Treg cells/kg to about 1×10⁷ Treg cells/kg. The exact amount of cells to be administered is dependent upon a variety of factors, including the age, weight, and sex of the patient, and the extent and severity of the Treg-associated condition.

[0391] The cellular compositions of this invention can be administered to the subject by any recognized methods, either systemically or at a localized site. In one example, the most convenient time to administer the alloactivated cells to prevent GVHD in a transplant patient or in a cancer patient is during the time of surgery. To treat an autoimmune disease, the composition can be administered at the onset of symptoms and/or following onset of symptoms or even prior to the onset of symptoms (e.g., following detection of an autoimmune response). To keep the cells at the site until completion of the surgical procedure, it is convenient to administer the cells in a pharmaceutically compatible artificial gel, or in clotted plasma or by utilizing any other known controlled release mechanism (see above). When less invasive procedures are desired, the composition can be injected at a desired location through a needle. For deeper sites, the needle can be positioned using endoscopic ultrasound techniques, radioscintigraphy, or some other imaging technique, alone or in combination with the use of an appropriate scope or cannula. For such applications, the cell population is conveniently administered when suspended in isotonic saline or a neutral buffer.

### Isolation or Enrichment of Cells

[0392] One exemplary approach to enrich for the desired cells is magnetic bead cell sorting (MACS) or any other cell sorting method making use of magnetism, e.g., Dynabeads®. A conventional MACS procedure is described by Miltenyi et al., 1990). In this procedure, cells are labeled with magnetic beads bound to an antibody or other compound that binds to a cell surface marker or protein and the cells are passed through a paramagnetic separation column or exposed to another form of magnetic field. The separation column is placed in a strong magnet, thereby creating a magnetic field within the column. Cells that are magnetically labeled are trapped in the column; cells that are not pass through. The trapped cells are then eluted from the column.

[0393] Cells of the invention can be enriched, for example, from a suitable sample using MACS to separate cells expressing a suitable protein. The sample is incubated with immunomagnetic beads that bind to the protein. Following incubation, samples are washed and resuspended and passed through a magnetic field to remove cells bound to the immunomagnetic beads, and cells bound to the beads collected. These techniques are equally applicable to negative selection, e.g., removal of cells expressing an undesirable marker, e.g., CD8, i.e., undesirable cells. Such a method involves contacting a population of cells with a magnetic particle labeled with a compound that binds to a cell surface marker expressed at detectable levels on the undesirable cell type(s). Following incubation, samples are washed and resuspended and passed through a magnetic field to remove cells bound to the immunomagnetic beads. The remaining cells depleted of the undesirable cell type(s) are then collected.

[0394] In another embodiment, a compound that binds to a protein or cell surface marker is immobilized on a solid surface and a population of cells is contacted thereto. Following washing to remove unbound cells, cells bound to the compound can be recovered, e.g., eluted, thereby isolating or enriching for cells expressing the protein to which the compound binds. Alternatively, cells that do not bind to the compound can be recovered if desired.

[0395] In a preferred embodiment, cells are isolated or enriched using fluorescence activated cell sorting (FACS). FACS is a known method for separating particles, including cells, based on the fluorescent properties of the particles and described, for example, in Kamarch, 1987. Generally, this method involves contacting a population of cells with compounds capable of binding to one or more proteins or cell surface markers, wherein compounds that bind to distinct markers are labeled with different fluorescent moieties, e.g., fluorophores. The cells are entrained in the center of a narrow, rapidly flowing stream of liquid. The flow is arranged so that there is a separation between cells relative to their diameter. A vibrating mechanism causes the stream of cells to break into individual droplets. The system is adjusted so that there is a low probability of more than one cell being in a droplet. Just before the stream breaks into droplets the flow passes through a fluorescence measuring station where the fluorescent character of interest of each cell is measured, e.g., whether or not a labeled compound is bound thereto. An electrical charging ring is placed at the point where the stream breaks into droplets. A charge is placed on the ring based on the immediately prior fluorescence intensity measurement and the opposite charge is trapped on the droplet as it breaks from the stream. The charged droplets then fall through an electrostatic deflection system that diverts droplets into containers based upon their charge, e.g., into one container if a labeled compound is bound to the cell and another container if not. In some systems the charge is applied directly to the stream and the droplet breaking off retains charge of the same sign as the stream. The stream is then returned to neutral after the droplet separates.

### Cell Culture

[0396] Following isolation cells of the invention can be maintained under standard cell culture conditions. For example, the cells can be maintained in Dulbecco Minimal Essential Medium (DMEM) or any other appropriate cell culture medium known in the art, e.g., as described above. Other appropriate media include, for example, MCDB, Minimal Essential Medium (MEM), IMDM, EXvivo™ and RPMI.

[0397] Cell cultures are preferably incubated at about 37° C. in a humidified incubator. Cell culture conditions can vary considerably for the cells of the present invention. Preferably, the cells are maintained in an environment suitable for cell growth, e.g., comprising 5% O₂, 10% CO₂, 85% N₂ or comprising 10% CO₂ in air.

[0398] In one embodiment, Treg cells are grown in the presence of anti-CD3 antibodies to facilitate expansion, optionally in the presence of IL-2 and/or TGF-β. In one example, cells are cultured in the presence of beads (e.g., magnetic iron-dextran beads-Dynabeads) coated with antibodies to CD3 and CD28. The anti-CD28 antibody provides signals for augmented activation and growth of the hypo-proliferative Treg cells. CD4⁺CD25⁺ cells grown with the beads with low ratio (low anti-CD3 compared to anti-CD28) are much more stable, and less likely to be overgrown with conventional T cells. The beads can easily be removed by passing the cultured cells through a magnetic column. Cell sorting is not required.

[0399] Treg cells can also be cultured in the presence of cytokines, e.g., IL-4 and/or IL-7, which increase survival of T cells and/or IL-10, which is partially responsible for production of regulatory T cells and/or IL-15, which has been shown to synergize with IL-2 and induce proliferation of CD4⁺CD25⁺ T cells.

[0400] In some examples, autologous CD4⁺ T cells as feeder cells. Alternatively, feeder-free cultures can be performed, e.g., using the beads described above together with IL-2. Moreover culture-expansion can be accomplished with or without host APCs, e.g., DCs.

### Stimulating or Enhancing an Immune Response

[0401] As will be apparent to the skilled artisan based on the description herein, the present invention also contemplates methods for enhancing an immune response in a subject by reducing or depleting Treg cells in the subject. In one example, reducing or depleting Treg cells in the subject is sufficient to induce an immune response, e.g., against a tumor and/or against an infectious agent. In another example, a method for inducing an immune response against a subject involves reducing or depleting Treg cells in the subject and administering a composition comprising an immunogenic compound.

[0402] As used herein, the term “immunogen” means any substance or organism that provokes an immune response (produces immunity) when introduced to a subject. In some embodiments, an immunogen can be used in therapeutic settings in a form of a vaccine. As used herein, and unless otherwise specified, the term “enhanced immune response” means that, when an immunogen is administered in combination with compound according to methods of this invention, there is an increased immunological response, preferably T cell response and/or antibody response, measured using any standard methods known in the art or described herein, in a subject that receives such an administration as compared to a subject to which a compound of the invention is not administered.

[0403] Immunogenic compounds used in methods of this invention may be a cancer antigen or a tumor antigen. Any cancer or tumor antigen known to one skilled in the art may be used in accordance with the immunogenic compositions of the invention including, but not limited to, KS 1/4 pan-carcinoma antigen (Perez and Walker, 1990), ovarian carcinoma antigen (CA125) (Yu et al, 1991), prostatic acid phosphate (Tailor et al, 1990), prostate specific antigen (Henttu and Vihko, 1989), melanoma-associated antigen p97 (Estin et al, 1989), melanoma antigen gp75 (Vijayasardahl et al, 1990), high molecular weight melanoma antigen (HMW-MAA) (Natali et al, 1987), prostate specific membrane antigen, carcinoembryonic antigen (CEA) (Foon et al, 1994), TAG-72 (Yokata et al, 1982), C017-1A (Ragnhammar et al, 1993); GICA 19-9 (Herlyn et al, 1982), CD19 (Ghetie et al, 1994), human B-lymphoma antigen-CD₂₀ (Reff et al, 1994), CD33 (Sgouros et al, 1993), GD2 (Saleh et al, 1993), ganglioside GD3 (shitara et al., 1993), ganglioside GM2 (Livingston et al., 1994), ganglioside GM3 (Hoon et al., 1993), bladder tumor oncofetal antigen (Hellstrom et al, 1985), L20 (Hellstrom et al, 1986), human leukemia T cell antigen-Gp37 (Bhattacharya-Chatterjee et al, 1986), EGFR (Epidermal growth factor receptor), HER2 antigen, polymorphic epithelial mucin (PEM) (Hilkens et al, 1992), malignant human lymphocyte antigen-APO-1 (Bernhard et al, 1989), differentiation antigen (Feizi, 1985), MAGE-I, MAGE-3, BAGE, GAGE-I, GAGE-I. Additional tumor antigens are described, for example, in Novellino et al., 2005.

[0404] In another example, the immunogen is a cancer cell or a lysate thereof.

[0405] In one example, the cancer is breast cancer.

[0406] In another example, the cancer is brain cancer, e.g., glioma.

[0407] In a further example, the cancer is gastric cancer.

[0408] In another example, the cancer is prostate cancer.

[0409] In another example, the cancer is melanoma.

[0410] In another example, the cancer is lymphoma, e.g., Hodgkin's lymphoma.

[0411] Immunogens used in methods of this invention may also be an infectious disease agent including, but not limited to, influenza virus hemagglutinin (Genbank Accession No. JO2132; Air, 1981), human respiratory syncytial virus G glycoprotein (Genbank Accession No. Z33429; Collins et al, 1984), core protein, matrix protein or any other protein of Dengue virus (Genbank Accession No. M19197; Hahn et al, 1988), measles virus hemagglutinin (Genbank Accession No. M81899; Rota et al, 1982), herpes simplex virus type 2 glycoprotein gB (Genbank Accession No. M14923; Bzik et al, 1986), poliovirus I VP1 (Emini et al, 1983), envelope glycoproteins of HIV-I (Putney et al, 1986), hepatitis B surface antigen (Itoh et al, 1986), diptheria toxin (Audibert et al, 1981), streptococcus 24M epitope (Beachey, 1985), hepatitis B virus core protein and/or hepatitis B virus surface antigen or a fragment or derivative thereof (see, e.g., GB 2034323).

[0412] In one example, the immunogenic compound is a DNA encoding a polypeptide antigen.

[0413] In one example, the immunogenic composition additionally comprises an adjuvant. Adjuvants are molecules and preparations that improve the immunogenicity of antigens. They can have immunopotentiating activity, but can also have, instead of or in addition to such activity, properties to alter the physical state of the immunogen. The effects of adjuvants are not antigen-specific. If they are administered together with a purified antigen, however, they can be used to selectively promote the response to the antigen. For example, the immune response is increased when protein antigens are precipitated by alum. Emulsification of antigens also prolongs the duration of antigen presentation. Suitable adjuvants include all acceptable immunostimulatory compounds, such as cytokines, toxins or synthetic compositions. Exemplary, often preferred adjuvants include, but are not limited, complete Freund's adjuvant (a non-specific stimulator of the immune response containing killed Mycobacterium tuberculosis), incomplete Freund's adjuvants, and aluminum hydroxide adjuvant. Other adjuvants that can also be used include MDP compounds, such as, for example, thur-MDP and nor-MDP, CGP (MTP-PE), lipid A, and monophosphoryl lipid A (MPL). RIBI, which contains three components extracted from bacteria, MPL, trehalose dimycolate (TDM) and cell wall skeleton (CWS) in a 2% squalene/Tween 80 emulsion is also contemplated. Amphipathic and surface active agents, e.g., saponin and derivatives such as QS21 (Cambridge Biotech), form yet another group of adjuvants contemplated for use in embodiments of the present invention. Nonionic block copolymer surfactants can also be employed.

### Suppressing and Immune Response

[0414] The present invention also provides a method of treating or preventing a condition associated with reduced Treg cell numbers or activity, and/or inducing immunosuppression, and/or reducing CTL or Thelper cell activity in a subject, said method comprising:
[0415] (1) isolating a population of Treg cells by performing a method as described herein according to any embodiment; and
[0416] (ii) administering the cells at (i) to the subject.

[0417] Alternatively, or in addition, the method comprises administering a population of cells as described herein according to any embodiment.

[0418] In one example, the subject suffers from or is at risk of developing a condition associated with reduced Treg numbers and/or activity and/or requires a reduction in CTL or Thelper cell activity (e.g., the subject suffers from or is at risk of developing an autoimmune disease) and/or the subject requires immunosuppression (e.g., is undergoing or about to undergo a transplant or suffers from graft-versus-host disease). Methods for determining a subject suffering from a condition will be apparent to the skilled artisan based on the description herein.

[0419] In one example, the subject suffers from type 1 diabetes.

[0420] In another example, the subject suffers from multiple sclerosis.

[0421] In a further example, the subject suffers from inflammatory bowel disease.

[0422] In a preferred example, the subject suffers from arthritis, e.g., rheumatoid arthritis.

[0423] Methods for identifying and/or isolating and/or culturing and/or formulating Treg cells for therapy are described herein.

### Detection Assays

### Protein Detection Assays

[0424] In one embodiment, the method of the invention detects the presence of a protein. The amount, level or presence of a polypeptide is determined using any of a variety of techniques known to the skilled artisan such as, for example, a technique selected from the group consisting of, immunohistochemistry, immunofluorescence, an immunoblot, a Western blot, a dot blot, an enzyme linked immunosorbent assay (ELISA), radioimmunoassay (MA), enzyme immunoassay, fluorescence resonance energy transfer (FRET), matrix-assisted laser desorption/ionization time of flight (MALDI-TOF), electrospray ionization (ESI), mass spectrometry (including tandem mass spectrometry, e.g. LC MS/MS), biosensor technology, evanescent fiber-optics technology or protein chip technology.

[0425] In one embodiment the assay used to determine the amount or level of a protein is a semi-quantitative assay.

[0426] In another embodiment the assay used to determine the amount or level of a protein is a quantitative assay.

[0427] Preferably, the protein is detected with an immunoassay. Preferably, using an assay selected from the group consisting of, immunohistochemistry, immunofluorescence, enzyme linked immunosorbent assay (ELISA), fluorescence linked immunosorbent assay (FLISA) Western blotting, RIA, a biosensor assay, a protein chip assay and an immunostaining assay (e.g. immunofluorescence). Preferably, the detection method is a flow cytometry method, e.g., detection of the number of Treg cells using fluorescence activated cell sorting (FACS), e.g., as is known in the art and/or described herein.

[0428] Standard solid-phase ELISA or FLISA formats are particularly useful in determining the concentration of a protein from a variety of samples.

[0429] In one form such an assay involves immobilizing a biological sample onto a solid matrix, such as, for example a polystyrene or polycarbonate microwell or dipstick, a membrane, or a glass support (e.g. a glass slide). A compound (e.g., an antibody) that specifically binds to a protein set out in any one or more of Tables 2, 4 or 5 is brought into direct contact with the immobilized biological sample, and forms a direct bond with any of its target protein present in said sample. This antibody is generally labeled with a detectable reporter molecule, such as for example, a fluorescent label (e.g. FITC or Texas Red) or a fluorescent semiconductor nanocrystal (as described in U.S. Pat. No. 6,306,610) in the case of a FLISA or an enzyme (e.g. horseradish peroxidase (HRP), alkaline phosphatase (AP) or β-galactosidase) in the case of an ELISA, or alternatively a second labeled antibody can be used that binds to the first antibody. Following washing to remove any unbound antibody the label is detected either directly, in the case of a fluorescent label, or through the addition of a substrate, such as for example hydrogen peroxide, TMB, or toluidine, or 5-bromo-4-chloro-3-indol-beta-D-galaotopyranoside (x-gal) in the case of an enzymatic label. Such ELISA or FLISA based systems are particularly suitable for quantification of the amount of a protein in a sample, by calibrating the detection system against known amounts of a protein standard to which the antibody binds, such as for example, an isolated and/or recombinant polypeptide or immunogenic fragment thereof or epitope thereof.

[0430] In another form, an ELISA or FLISA comprises of immobilizing a compound (e.g., an antibody) on a solid matrix, such as, for example, a membrane, a polystyrene or polycarbonate microwell, a polystyrene or polycarbonate dipstick or a glass support. A sample is then brought into physical relation with said antibody, and the protein to which said compound binds is bound or ‘captured’. The bound protein is then detected using a second labeled compound that binds to a different protein or a different site in the same protein. Alternatively, a third labeled antibody can be used that binds the second (detecting) antibody.

[0431] It will be apparent to the skilled person that the assay formats described herein are amenable to high throughput formats, such as, for example automation of screening processes or a microarray format as described in Mendoza et al., 1999. Furthermore, variations of the above-described assay will be apparent to those skilled in the art, such as, for example, a competitive ELISA.

[0432] In an alternative embodiment, a polypeptide is detected within or on a cell, using methods known in the art, such as, for example, immunohistochemistry or immunofluorescence. Methods using immunofluorescence are preferable, as they are quantitative or at least semi-quantitative. Methods of quantitating the degree of fluorescence of a stained cell are known in the art and described, for example, in Cuello, 1984.

[0433] Biosensor devices generally employ an electrode surface in combination with current or impedance measuring elements to be integrated into a device in combination with the assay substrate (such as that described in U.S. Pat. No. 5,567,301). A compound that specifically binds to a protein o is preferably incorporated onto the surface of a biosensor device and a biological sample contacted to said device. A change in the detected current or impedance by the biosensor device indicates protein binding to said antibody. Some forms of biosensors known in the art also rely on surface plasmon resonance to detect protein interactions, whereby a change in the surface plasmon resonance surface of reflection is indicative of a protein binding to a ligand or antibody (U.S. Pat. No. 5,485,277 and U.S. Pat. No. 5,492,840).

[0434] Biosensors are of particular use in high throughput analysis due to the ease of adapting such systems to micro- or nano-scales. Furthermore, such systems are conveniently adapted to incorporate several detection reagents, allowing for multiplexing of diagnostic reagents in a single biosensor unit. This permits the simultaneous detection of several proteins or peptides in a small amount of body fluids.

[0435] Evanescent biosensors are also preferred as they do not require the pretreatment of a biological sample prior to detection of a protein of interest. An evanescent biosensor generally relies upon light of a predetermined wavelength interacting with a fluorescent molecule, such as for example, a fluorescent antibody attached near the probe's surface, to emit fluorescence at a different wavelength upon binding of the target polypeptide to the compound.

[0436] Micro- or nano-cantilever biosensors are also preferred as they do not require the use of a detectable label. A cantilever biosensor utilizes a compound capable of specifically detecting the analyte of interest that is bound to the surface of a deflectable arm of a micro- or nano-cantilever. Upon binding of the analyte of interest (e.g. a marker within a polypeptide) the deflectable arm of the cantilever is deflected in a vertical direction (i.e. upwards or downwards). The change in the deflection of the deflectable arm is then detected by any of a variety of methods, such as, for example, atomic force microscopy, a change in oscillation of the deflectable arm or a change in pizoresistivity. Exemplary micro-cantilever sensors are described in US20030010097.

[0437] To produce protein chips, the proteins, peptides, polypeptides, antibodies or ligands that are able to bind specific antibodies or proteins of interest are bound to a solid support such as for example glass, polycarbonate, polytetrafluoroethylene, polystyrene, silicon oxide, metal or silicon nitride. This immobilization is either direct (e.g. by covalent linkage, such as, for example, Schiff's base formation, disulfide linkage, or amide or urea bond formation) or indirect. Methods of generating a protein chip are known in the art and are described in for example US20020136821, US20020192654, US20020102617 and U.S. Pat. No. 6,391,625. To bind a protein to a solid support it is often necessary to treat the solid support so as to create chemically reactive groups on the surface, such as, for example, with an aldehyde-containing silane reagent. Alternatively, an antibody or ligand may be captured on a microfabricated polyacrylamide gel pad and accelerated into the gel using microelectrophoresis as described in, Arenkov et al., 2000.

### Imaging Methods

[0438] As will be apparent to the skilled artisan from the foregoing, the present invention also contemplates imaging methods using a compound that binds to a protein listed in Table 2, 4 and/or 5. For imaging, a compound is generally conjugated to a detectable label, which can be any molecule or agent that can emit a signal that is detectable by imaging. However, a secondary labeled compound that specifically binds to the primary compound may also be used. Exemplary detectable labels include a protein, a radioisotope, a fluorophore, a visible light emitting fluorophore, infrared light emitting fluorophore, a metal, a ferromagnetic substance, an electromagnetic emitting substance a substance with a specific magnetic resonance (MR) spectroscopic signature, an X-ray absorbing or reflecting substance, or a sound altering substance.

[0439] The detection compound (and, if used the labeled secondary compound) can be administered either systemically or locally to an organ, or tissue (or tumor, in the case of a cancer) to be imaged, prior to the imaging procedure. Generally, the compound is administered in doses effective to achieve the desired optical image of a tumor, tissue, or organ. Such doses may vary widely, depending upon the particular compound employed, condition to be imaged, tissue, or organ subjected to the imaging procedure, the imaging equipment being used, and the like.

[0440] In some examples of the invention, the compound is used as in vivo optical imaging agents of tissues and organs in various biomedical applications including, but not limited to, imaging of tumors, tomographic imaging of organs, monitoring of organ functions, coronary angiography, fluorescence endoscopy, laser guided surgery, photoacoustic and sonofluorescence methods, and the like.

[0441] Examples of imaging methods include magnetic resonance imaging (MRI), MR spectroscopy, radiography, computerized tomography (CT), ultrasound, planar gamma camera imaging, single-photon emission computed tomography (SPECT), positron emission tomography (PET), other nuclear medicine-based imaging, optical imaging using visible light, optical imaging using luciferase, optical imaging using a fluorophore, other optical imaging, imaging using near infrared light, or imaging using infrared light.

[0442] In some examples, an imaging agent is tested using an in vitro or in vivo assay prior to use in humans, e.g., using a model described herein.

### Nucleic Acid Detection Assays

[0443] In another example, a Treg cell is detected and/or a Treg-associated condition is diagnosed/prognosed by detecting the level of expression of a nucleic acid. Exemplary assays for such detection include quantitative RT-PCR, NASBA, TMA or ligase-chain reaction.

[0444] Methods of RT-PCR are known in the art and described, for example, in Dieffenbach (ed) and Dveksler (ed) 1995.

[0445] Methods of TMA or self-sustained sequence replication (3SR) use two or more oligonucleotides that flank a target sequence, a RNA polymerase, RNase H and a reverse transcriptase. One oligonucleotide (that also comprises a RNA polymerase binding site) hybridizes to an RNA molecule that comprises the target sequence and the reverse transcriptase produces cDNA copy of this region. RNase H is used to digest the RNA in the RNA-DNA complex, and the second oligonucleotide used to produce a copy of the cDNA. The RNA polymerase is then used to produce a RNA copy of the cDNA, and the process repeated.

[0446] NASBA systems relies on the simultaneous activity of three enzymes (a reverse transcriptase, RNase H and RNA polymerase) to selectively amplify target mRNA sequences. The mRNA template is transcribed to cDNA by reverse transcription using an oligonucleotide that hybridizes to the target sequence and comprises a RNA polymerase binding site at its 5′ end. The template RNA is digested with RNase H and double stranded DNA is synthesized. The RNA polymerase then produces multiple RNA copies of the cDNA and the process is repeated.

[0447] Clearly, the hybridization to and/or amplification of a nucleic acid using any of these methods is detectable using, for example, electrophoresis and/or mass spectrometry. In this regard, one or more of the probes/primers and/or one or more of the nucleotides used in an amplification reactions may be labeled with a detectable marker to facilitate rapid detection of a marker, for example, a fluorescent label (e.g. Cy5 or Cy3) or a radioisotope (e.g. ³²P). Alternatively, amplification of a nucleic acid may be continuously monitored using a melting curve analysis method, such as that described in, for example, U.S. Pat. No. 6,174,670.

### Samples

[0448] To the extent that the method of the present invention is performed in vitro, on an isolated tissue sample, rather than as an in vivo based screen, reference to “sample” should be understood as a reference to any sample of biological material derived from an animal such as, but not limited to, a body fluid (e.g., blood or synovial fluid or cerebrospinal fluid), cellular material (e.g. tissue aspirate), tissue biopsy specimens or surgical specimens. The “biological sample” or “tissue sample” includes extracts and/or derivatives and/or fractions of said sample, e.g., serum, plasma, peripheral blood mononuclear cells (PBMC), a buffy coat fraction. Preferably, the sample comprises Treg cells or is likely to comprise Treg cells.

[0449] The sample which is used according to the present invention may be used directly or may require some form of treatment prior to use. For example, a biopsy or surgical sample may require homogenization or other form of cellular dispersion prior to use. Furthermore, to the extent that the biological sample is not in liquid form, (if such form is required or desirable) it may require the addition of a reagent, such as a buffer, to mobilize the sample.

[0450] As will be apparent from the preceding description, such an assay may require the use of a suitable control, e.g. a normal or healthy individual or a typical population, e.g., for quantification.

[0451] As used herein, the term “normal individual” shall be taken to mean that the subject is selected on the basis that they do not have abnormal numbers of Treg cells in a sample derived therefrom, e.g., they have a level of Treg cells within the range detected in a population of healthy subjects.

[0452] A “healthy subject” is one that has not been diagnosed as suffering from a Treg-associated condition and/or is not at risk of developing a Treg-associated condition.

[0453] Alternatively, or in addition, a suitable control sample is a control data set comprising measurements of the marker being assayed for a typical population of subjects known not to suffer from a Treg-associated condition.

[0454] In one embodiment, a reference sample is not included in an assay. Instead, a suitable reference sample is derived from an established data set previously generated from a typical population. Data derived from processing, analyzing and/or assaying a test sample is then compared to data obtained for the sample population.

### Screening Assays

[0455] As discussed hereinabove, the present invention also provides methods for identifying or isolating a compound that binds to and/or modulates Treg cell activity. Suitable compounds for screening include, for example, antibodies, peptides or small molecules, e.g., as described herein according to any embodiment.

[0456] In some embodiments, this method comprises determining an agent that binds to the recited protein. Such assays will be apparent to the skilled artisan. For example, the protein or a cell expressing same is immobilized on a solid surface and contacted with a labeled compound. Following washing to remove unbound compound the leyel of label is detected, which is indicative of the amount of label bound.

[0457] In some embodiments, the method additionally comprises determining the effect of a compound on expression of a nucleic acid or protein. Suitable methods for determining expression levels are known in the art and/or described herein.

[0458] This invention also provides for the provision of information concerning the identified or isolated compound. Accordingly, the screening methods are further modified by:

(i) optionally, determining the structure of the compound; and
(ii) providing the compound or the name or structure of the compound such as, for example, in a paper form, machine-readable form, or computer-readable form.

[0459] Naturally, for compounds that are known albeit not previously tested for their function using a screen provided by the present invention, determination of the structure of the compound is implicit. This is because the skilled artisan will be aware of the name and/or structure of the compound at the time of performing the screen.

[0460] As used herein, the term “providing the compound” shall be taken to include any chemical or recombinant synthetic means for producing said compound or alternatively, the provision of a compound that has been previously synthesized by any person or means. This clearly includes isolating the compound.

[0461] In a preferred embodiment, the compound or the name or structure of the compound is provided with an indication as to its use e.g., as determined by a screen described herein.

[0462] The screening assays can be further modified by:

(i) optionally, determining the structure of the compound;
(ii) optionally, providing the name or structure of the compound such as, for example, in a paper form, machine-readable form, or computer-readable form; and
(iii) providing the compound.

[0463] In a preferred embodiment, the synthesized compound or the name or structure of the compound is provided with an indication as to its use e.g., as determined by a screen described herein.

[0464] In one embodiment, the compound is provided in a library of compounds, each of which or a subset of which may be separated from other members (i.e., physically isolated). In such cases, a compound is isolated from the library by its identification, which then permits a skilled person to produce that compound in isolation, e.g., in the absence of other members of the library.

[0465] In some embodiments, the screening methods described herein comprise determining the effect of an isolated and/or identified compound on Treg activity and/or cell numbers (e.g., cell death. Such an assay may be performed in vitro and/or in vivo.

### In Vitro Assays

[0466] An exemplary in vitro method for determining the effect of a compound on Treg activity is, for example, a mixed lymphocyte reaction (MLR) or a mixed lymphocyte culture (MLC). Such a method involves culturing a mixture of cells, e.g., Treg cells as isolated by a method described herein and allotypically different T cells are cultured together. Several measures may then be performed to measure Treg activity, e.g., cell proliferation is then measured using a standard method, e.g., ¹³H thymidine incorporation (which indicates proliferation of active T cells indicating that the Treg cells are not active); and/or cytokine secretion by either Treg cells or other T cells which can indicate Treg activity or inactivity. Such a method is useful for identifying Treg cells having regulatory ability and/or for identifying compounds that induce/enhance or suppress/prevent Treg activity. An exemplary MLR is described in Wang et al., 2008.

[0467] Alternatively, or in addition an in vitro method for determining the effect of a compound on Treg cells is a 5,6-carboxy fluorescein diacetate succinimidyl ester (CFSE) suppressor assay, e.g., as described herein in the examples. In such an assay CD4+CD25− cells are labeled with CFSE. CD4⁺CD25⁻ CFSE labeled T cells are then cultured with irradiated PBMCs in the presence of varying amounts of cells isolated according to the present invention. After a sufficient time, proliferation of the CD4+CD25− CFSE labeled T cells is analysed by flow cytometry. Each CFSE signal peak represents one division cycle. The ability of Treg cells cells to suppress cell proliferation is assessed by comparing CFSE signal peaks of CD4⁺CD25⁻ CFSE labeled T cells with and without the presence of a regulatory cell population. An exemplary CFSE suppressor assay is described in Venken et al., (2007).

[0468] Alternatively, or in addition, Treg cells are isolated, cultured in the presence or absence of a test compound and activated, e.g., as described herein. Secretion of IL-10 and/or TGF-β is then assessed using standard techniques, e.g., ELISA or FLISA.

[0469] As will be apparent to the skilled artisan, methods of screening may involve detecting levels of cell death, cell proliferation and/or cell survival. Such methods are known in the art.

[0470] In one embodiment, death of isolated Treg cells in the presence or absence of a compound is assayed (e.g., to isolate a compound that kills Treg cells), e.g., using a method for the detection of cellular components associated with cell death, such as, for example apoptosis. Methods for detecting cell death in a cell are known in the art. For example, APOPTEST (available from Immunotech) stains cells early in apoptosis, and does not require fixation of the cell sample (Martin et al., 1994). This method utilizes an annexin V antibody to detect cell membrane re-configuration that is characteristic, of cells undergoing apoptosis. Apoptotic cells stained in this manner can then be sorted either by fluorescence activated cell sorting (FACS), ELISA or by adhesion and panning using immobilized annexin V antibodies. Alternatively, a terminal deoxynucleotidyl transferase-mediated biotinylated UTP nick end-labeling (TUNEL) assay is used to determine the level of cell death. The TUNEL assay uses the enzyme terminal deoxynucleotidyl transferase to label 3′-OH DNA ends, generated during apoptosis, with biotinylated nucleotides. The biotinylated nucleotides are then detected by using streptavidin conjugated to a detectable marker. Kits for TUNEL staining are available from, for example, Intergen Company, Purchase, N.Y. Alternatively, or in addition, an activated caspase, such as, for example, Caspase 3 is detected. Several caspases are effectors of apoptosis and, as a consequence, are only activated to significant levels in a cell undergoing programmed cell death. Kits for detection of an activated caspase are available from, for example, Promega Corporation, Madison Wis., USA. Such assays are useful for both immunocytochemical or flow cytometric analysis of cell death. Such assays can be performed with other cells, e.g. Thelper cells and/or CTLs to identify and/or isolate compounds that selectively kill Treg cells.

[0471] In one example, the phenotype being assayed is cell survival. Cell survival may simply be detected by maintaining the cells for a sufficient time for a visible colony of cells to form. Clearly, this provides a simple method for high-throughput screening of compounds as compounds capable of inducing cell survival are easily recovered from the colony of cells.

[0472] Alternatively, cell viability or cell metabolism assay may be detected and/or assayed. By way of example, non-fluorescent resazurin is added to cells cultured in the presence of a peptide of the present invention. Viable cells reduce resazurin to red-fluorescent resorufin, easily detectable, using, for example microscopy or a fluorescent plate reader. This marker of cell viability is useful for a variety of different cell types, from bacteria to higher eukaryotes. Kits for analysis of cell viability are available, for example, from Molecular Probes, Eugene, Oreg., USA. Other assays for cell viability include for example, assays that detect WST-8 reduction to formazan salt in live cells (Alexis Biochemicals), staining of live cells with cell-permeable calcein acetoxymethyl (calcein AM) which is converted to fluorescent calcein by intracellular esterases, detection of XTT reduction to formazan salt (Intergen), MTS reduction to formazan salt (Promega Corporation).

[0473] In yet another embodiment, the phenotype of interest is cellular proliferation. Methods for determining cellular proliferation are known in the art. For example, incorporation of ³ H-thymidine or ¹⁴C-thymidine into DNA as it is synthesized is an assay for DNA synthesis associated with cell division. In such an assay, a cell is incubated in the presence of labeled thymidine for a time sufficient for cell division to occur. Following washing to remove any unincorporated thymidine, the label (e.g. the radioactive label) is detected, e.g., using a scintilation counter. Assays for the detection of thymidine incorporation into a live cell are available from, for example, Amersham Pharmacia Biotech. In another embodiment, cellular proliferation is measured using a MTT assay. The yellow tetrazolium MTT (3-(4,5-dimethylthiazolyl-2)-2,5-diphenyltetrazolium bromide) is reduced by metabolically active cells, in part by the action of dehydrogenase enzymes, to generate reducing equivalents such as NADH and NADPH. The resulting intracellular purple formazan is then solubilized and quantified by spectrophotometric means. Assay kits for MIT assays are available from, for example, American Type Culture Collection.

[0474] Alternative assays for determining cellular proliferation, include, for example, measurement of DNA synthesis by BrdU incorporation (by ELISA or immunohistochemistry, kits available from Amersham Pharmacia Biotech), expression of proliferating cell nuclear antigen (PCNA) (by ELISA, FACS or immunohistochemistry, kits available from Oncogen Research Products) or a Hoechst cell proliferation assay that detects DNA synthesis (available from Trevigen Inc.).

### In Vivo Assays

[0475] In another example, a population of cells isolated by a method as described herein according to any embodiment is determined by administering the cells to an animal model of a condition associated with Treg cells. For example, the cells are administered to an animal lacking Treg cells e.g., as a result of myeloablation or mice lacking FoxP3 expression e.g., as described in (Asano (1996); Suri-Payer (1998); and McHugh (2002). Cells that suppress, prevent, reduce or delay an autoimmune response are considered to have regulatory T cell function.

[0476] Alternatively, or in addition, cells isolated by a method as described herein according to any embodiment are administered to nude mice at the time of, prior to or after transfer of CD4⁺CD25⁻ (which induce autoimmune disease), e.g., as described in Sakaguchi et al., (1995). Cells that suppress, prevent, reduce or delay an autoimmune response are considered to have regulatory T cell function.

[0477] Isolated cells can also be administered to NOD mice to test their ability to suppress, prevent, treat or delay diabetes (e.g., as described in Tang et al., (2004)) and/or to a mouse model of GVHD (e.g., as described in Trenado (2002)) and/or to a mouse model of psoriasis (e.g., Wang et al., 2008) and/or to a model of rheumatoid arthritis e.g., a SKG strain of mouse (Sakaguchi et al.), rat type II collagen arthritis model, mouse type II collagen arthritis model or antigen induced arthritis models in several species (Bendele, 2001)) and/or a model of multiple sclerosis (for example, experimental autoimmune encephalomyelitis (EAE; Bradl and Linington, 1996)) and/or inflammatory airway disease (for example, OVA challenge or cockroach antigen challenge (Chen et al., 2007; Lukacs et al., 2001) and/or models of inflammatory bowel disease (e.g., dextran sodium sulphate (DSS)-induced colitis or Muc2 deficient mouse model of colitis (Van der Sluis et al., 2006) or CD45Rb adoptive transfer model of colitis (e.g., Kanai et al., 2006)). These models are also useful for testing compounds for their ability to enhance or increase Treg function.

[0478] Compounds to be tested for their ability to suppress Treg function and/or numbers can be administered to a test subject and the number of Treg cells detected/isolated using standard methods or methods described herein. A reduction in the number of Treg cells compared to the number of Treg cells from an untreated subject indicates that the compound reduces Treg numbers.

[0479] Alternatively, or in addition, a compound is administered to a test subject at the time of, prior to or following administration of tumor cells. The presence/absence and/or size of any resulting tumor is then assessed and compared to subjects to which the cells but not the compound has been administered. A compound that reduces tumor size and/or prevents tumor formation is considered to reduce Treg function and permit induction of an immune response against the tumor cells. Exemplary methods are described in Jones et al., 2002.

[0480] In another example, a test compound is administered at the time of or prior to administration of a composition comprising an immunogenic compound. The immune response is then measured against the immunogenic compound, e.g., antibody response (e.g., by ELISA/FLISA) or a T cell response (e.g., by ELISPOT or Fluorospot). Alternatively, or in addition, the compound and composition are administered to a subject suffering from or developing a condition treatable by an immune response, e.g., an infection or a tumor. Suitable models are known in the art and/or described herein.

### Kits

[0481] The present invention also provides therapeutic/prophylactic/diagnostic kits comprising compounds of the present invention for use in the present detection/isolation/diagnostic/prognostic/treatment/prophylactic methods. Such kits will generally contain, in suitable container means, a compound of the present invention. The kits may also contain other compounds, e.g., for detection/isolation/diagnosis/imaging or combined therapy. For example, such kits may contain any one or more of a range of anti-inflammatory drugs and/or chemotherapeutic or radiotherapeutic drugs; anti-angiogenic agents; anti-tumor cell antibodies; and/or anti-tumor vasculature or anti-tumor stroma immunotoxins or coaguligands or vaccines.

[0482] In one example, the kit is for isolating a Treg cell and comprises a protein that binds to a protein identified in any one or more of Tables 2-6. Optionally, the compound is bound to or conjugated with a detectable label or a solid support or a magnetic particle. For example, the compound is labeled with a detectable label to facilitate FACS. The compound may also be labeled with a magnetic or paramagnetic particle to facilitate MACS.

[0483] In a further example, the kit is for treatment or prevention of a condition. In such kits the compound may be provided in solution or in a lyophilized form', optionally with a solution for resuspension. The protein may be conjugated to a therapeutic compound or the kit may include a therapeutic compound for conjugation thereto. As discussed above, the kit may also comprise additional therapeutic or prophylactic compounds.

[0484] The present invention is described further in the following non-limiting examples.

### Example 1

### Materials and Methods

[0485] 1.1 Isolation, In Vitro Expansion and Characterization of Cord Blood T cell Populations

[0486] Cord blood was obtained with informed maternal consent. Mononuclear cells (MNC) were isolated from 60-100 ml venous blood collected directly from cord blood post partum into pre-weighed blood collection bags (Penwell) containing anticoagulant essentially as described in Bersatz (2007). Cord blood CD4⁺CD25⁺ (Treg) and CD4⁺CD25⁻ (Thelper) cells were isolated from MNC using a Dynabeads Regulatory CD4⁺CD25⁺ T cell kit (Invitrogen). The purity for each cell type was routinely greater than 90% by two color flow cytometry for CD4 and CD25 expression. Ex vivo expansion of isolated T cell populations (1×10⁶ cells/well in a 24 well plate) were performed in X-Vivo 15 media (BioWhitticker) supplemented with 20 mM HEPES-, pH 7.4, 5% heat inactivated pooled human serum (Lonza), 2 mM 1-glutamine and 500 U/ml recombinant human interleukin-2 (rhIL2; R&D research) in the presence of Dynabeads CD3/CD28 T cell expander beads (Invitrogen) at a bead to cell ratio of 3:1. Cells were expanded for 8 days in the presence of Dynabeads prior to magnetic removal of the beads and culture in X-Vivo 15 media supplemented as above except with 100 U/ml rhIL2. On the day of use the phenotype of expanded cells were characterized by surface expression of CD4 (PEcy5, ebioscience clone RPA-T4), CD25 (PE, BD clone M-A251) and CD127 (PE, ebioscience clone ebioRDR73) in combination with intracellular detection of Foxp3 (Foxp3-Alexa 488, BD clone 259D/C7; Human FoxP3 Buffer Set) by three color flow cytometry on a Beckman Coulter Epics Elite ESP flow cytometer.

### RNA Preparation and Expression Array

[0487] Total RNA was isolated from expanded cells that were rested for approximately 60 hours prior to Ionomycin treatment (2 hours). Total RNA, including small molecular weight RNA, was isolated using QlAshredder and a miRNeasy mini kit (QIAGEN). Labeling and hybridization to Affymetrix Human Exon 1.0ST arrays was carried out essentially according to the manufacturer's protocols at the Biomolecular Resource Facility (John Curtin School of Medical Research, Australian National University). RNA quality was assayed for using an Agilent Systems Bioanalyzer prior to array experiments.

### RNA Expression Array Data Analysis

### Data Normalization

[0488] Probe level data was processed using the RMA model (Irrizary et al, 2003) with final transcript level estimates being obtained using probe-level modeling (Bolstad et al., 2003) based on v11.0 of an EntrezGene centric cdf (Dai et al., 2004). All processing was conducted using the statistical software R(R Development Core Team) under the aroma Affymetrix framework (Bengtsson and Bengtsson, 2006; Bengtsson and Hossjer, 2006). Hybridization quality for each array was assessed using pseudo-image plots, NUSE, RLE (Bolstad et al., 2003) and histograms of probe-level data. Log fold-change in a four way comparison between resting and stimulated treatments of CD4⁺CD25⁺ Treg cells vs CD4⁺CD25⁻ Thelper cells was estimated within individual donors after loess normalization. Final expression analysis was performed using array level weights and the R package limma (Smyth et al., 2005; Wettenhall and Smyth, 2004). Raw p-values for each term were adjusted globally using an FDR cutoff of 0.05 (Hochberg and Benjamini, 1990).

### Selection of Significantly Expressed Genes

[0489] Significantly differentially expressed genes for each comparison were selected using a two-tiered approach. The first tier consisted of the most highly ranked genes selected using defined FDR cut-offs [FDR<0.05-0.006 depending upon the individual comparison]. In the second tier, genes with a logFC greater than 0.7 and an FDR of less-than 0.05 were also selected except for the Treg .v. Thelper Resting comparison, where a logFC greater than 0.5 and an FDR less than 0.1 was used (FIG. 4). The four lists were then combined, and logFC values for each comparison included.

### Clustering Gene Expression Behavior

[0490] Genes from the combined list with a significant adjusted p-value in either of the CD25⁺ vs. CD25⁻ comparisons (p<0.05 for Stimulated, p<0.1 for Resting) were divided into 6 mutually exclusive groups, denoted as groups T1 to T6 (Table 6) based upon their behavior across all four comparisons. Genes with no effect in either CD25⁺ vs. 25⁻ comparison but with an activation effect in both CD25⁺ and CD25⁻ were additionally assigned to group A1. Clustering within each subgroup was performed using the agnes algorithm (Maechler et al; unpublished), based on significant log fold-change. For genes with a significant adjusted p-value in only one of the comparisons, the threshold of significance was raised to p<0.1 for all other comparisons. (All p-values <10⁻⁷).

### Semi-Quantitative Real Time PCR

[0491] Random primed cDNA was prepared from total RNA using a QuantiTect reverse transcriptase kit (QIAGEN). cDNA was used in a 25u1 qPCR reactions consisting of 1.25 Units FastTaq DNA polymerase (Roche), 2.5 mM MgCl₂, 200 uM each primer, 100 uM dNTP mix, 1.1×SYBR Green 1 (Molecular Probes) in 1×FastTaq PCR buffer. Gene specific primers pairs for qPCR were selected from Primerbank (Wang 2003). A primer set specific for RPL13a was used as an internal control. Gene specific primers pairs for qPCR were selected from Primerbank (Spandidos et al., 2008). Cycling conditions consisted of 40 cycles of: 50 seconds at 94° C., 25 seconds at 60° C., and 50 seconds at 72° C. followed by melt curve using a Rotorgene 6000 PCR machine (Corbet Research). Results were analyzed using Rotor-Gene 6000 and Q-gene software (Perikles Bioinformatics 19: 1439-1440, 2003).

### Treg Gene Expression Validation

[0492] To validate candidate genes identified in the expression array experiments, CD4⁺CD25⁺ or CD4⁺CD25⁻ cells purified from cord blood were cultured and stimulated as above. In addition, Adult peripheral blood was obtained from buffy coats provided by the Australian. Red Cross Blood Service. Total blood was stained with a CD4 RosetteSep enrichment cocktail (StemCell Technologies Inc) and PBMC isolated by Ficoll density gradient centrifugation, resulting in a population of 85-95% pure CD4⁺ cells. The CD4⁺ enriched PBMC were then stained with CD25-PE, CD4-APCH7, CD45R0—PeCy7 and CD45RA-APC conjugated monoclonal antibodies (BD Biosciences). Lymphocytes were gated based on forward/side scatter followed by CD4 CD25 double positive expression or CD4 single positive expression. These two cell populations were further sub-divided based on CD45RA or CD45R0 positivity, excluding populations with intermediate CD45RA and CD45R0 expression. The four sorted populations were: CD4⁺CD25⁺CD45RA⁺CD45R0⁻ (naïve Treg), CD4⁺CD25⁺CD45RA⁻CD45R0⁺ (activated/memory Treg), CD4⁺CD25⁻CD45RA⁺CD45R0⁻ (naïve Th), CD4⁺CD25⁻CD45RA⁻CD45R0⁺ (memory Th). Samples of cells were retained to assess FoxP3 protein by intracellular flow cytometry using an Alexa Fluor 488 Human FoxP3 Staining Set (eBioscience) and were 60-80% FoxP3 positive. RNA was then purified from the four sorted populations using a miRNeasy Mini Kit (Qiagen). FoxP3 mRNA expression in the sorted populations was confirmed by quantitative RT-PCR.

### Validation of Cell Surface Molecules

[0493] For surface molecule analysis cord blood CD4⁺CD25⁺ Treg or CD4⁺CD25⁻ Thelper cells were either freshly isolated or isolated and stimulated overnight in the presence of CD3/CD28 beads (bead to cell ratio, 1:1) and 100 U/ml IL2, prior to 4 color flow cytometry using antibodies against CD4, CD25, FoxP3 and test antigen.

### Target Validation by Flow Cytometry

[0494] Purified and unconjugated antibodies against the following proteins were purchased from the indicated source: AQP3 (Santa Cruz), C18orf1 (Abnova), CD11b (Becton Dickinson Biosciences, BD), CD121 (BD), CD146 (eBioscience), CD33 (BD), CD49f (BD), CD66 (BD), CD79a (BD), CD79b (BD), CD8b (PE conjugated, BD), EPHB1 (Abnova), FCER1g (Santa Cruz), IFNgR2 (Abcam), LRP6 (Santa Cruz), LSR (Abnova), NPDC1 (Abcam), PERP (Abnova), PI16 (pAb, Abnova), PKD1L3 (Abcam), PTPRb (Santa Cruz), RGMB (Santa Cruz), TLR6 (eBioscience), TSPAN15 (Santa Cruz), VSIG1 (R&D Systems). For each antibody the appropriate isotype-control (species, Ig isotype and company) was used.

[0495] Analyses of the reactivity of the target antibodies were performed using a three-step “high sensitivity” staining protocol (Mavrangelos et al., 2004) on peripheral blood mononuclear cells (PBMC). Peripheral blood mononuclear cells were isolated from whole blood (obtained from healthy volunteers) by density centrifugation over Lymphoprep (Nycomed) and were washed twice with PBS-Azide. Blood was collected using lithium-heparin anticoagulant.

[0496] PBMC were incubated with the unconjugated primary antibody for 30 min on ice, and then washed twice with PBS-azide. Biotinylated horse anti-mouse Ig reagent (VECTOR Laboratories) was added followed by 30 min incubation and two PBS-azide washes. Normal mouse serum (Dako) was added (to block free Ig-binding sites on the anti-mouse Ig) and 10 min later the SA-PE detection reagent (BD), as well as the directly conjugated antibodies (CD3, CD4, CD25, CD127—depending on the screening step) were added. No wash step was included between the incubation of the mouse Ig and the addition of the final reagents. All incubations were carried out in melting ice. Cells were acquired on a FACSAria II flow cytometer and analyzed using FACSDiva software v5.0.2 (both BD). For data analysis, 100.000 viable cells (gated in FSC/SSC dot plots) were acquired for each sample.

[0497] In experiments where FoxP3 expression was analyzed, the surface staining was performed first, and the cells were then permeabilized and stained according to the instructions provided by the manufacturer (FoxP3 Buffer System, BD).

### RNA Preparation and Expression Analysis by Custom TaqMan® Low Density Array.

[0498] Total RNA was isolated from expanded cord blood Thelper and nTreg cells that were rested for approximately 60 hours following an 8 day expansion protocol prior to either vehicle (DMSO) or Ionomycin treatment (2 hours). Total RNA, including small molecular weight RNA, was isolated using QIAshredder and a miRNeasy mini kit (QIAGEN). Total RNA (2 μg) was converted to cDNA using a High Capacity cDNA Transcription Kit (Applied Biosysytems). Each cDNA synthesis reaction was combined with TaqMan® Universal PCR master mix and loaded equally into 4 sample fill-reservoirs of a Custom TaqMan® Low Density Array (Format 96b). Amplification and data acquisition was carried out on a &900HT Real-Time PCR System (Applied Biosystems). Donor matched control or stimulated Thelper and nTreg samples were loaded on the same array. Relative quantitation (RQ) of targets were performed using the comparative Ct (ΔΔCT) method using RQ manager (SDSv2.3 software, Applied Biosystems). The Custom TaqMan® Low Density Array was built using validated TaqMan® gene expression assays.

In Vitro Production of Inducible T Regulatory (iTreg) Cells

[0499] The in vitro conversion of cord blood CD4⁺CD25⁻ cells to iTreg cells was carried by expanding cells in the presence of 5 ng/ml of recombinant human TGFβ-1 (transforming growth factor beta-1, R&D Systems) essentially as described in Tran et al., (2007) with the following modifications: Cord blood CD4⁺CD25⁻ (Thelper) cells were isolated from mononuclear cells (PBMC) using a Dynabeads Regulatory CD4⁺CD25⁺ T cell kit (Invitrogen) and expanded in complete X-Vivo 15 (Lonza) media (X-Vivo15 supplemented with 20 mM HEPES-, pH 7.4, 5% heat inactivated pooled human serum and 2 mM L-glutamine) and 500 U/ml recombinant human interleukin-2 (rhIL2; R&D Systems) in the presence of Dynabeads CD3/CD28 T cell expander beads (bead to cell ratio of 3:1, Invitrogen). Cells were expanded for a total of eight days before beads were removed and the cells rested in complete X-Vivo-15 media supplemented with 100 U/ml IL2. Control and TGFβ-1 treated cells were then analyzed for FoxP3 and surface markers.

### Example 2

### Isolation and Validation of Human Cord Blood Treg Cells

[0500] Following a single round of ex vivo expansion by cross-linking CD3 and CD28 using anti CD3/CD28 beads, 100-200 fold expansion of the cord blood Treg cells was routinely obtained. These cells maintained a Treg phenotype upon expansion, with between 80-90% of the expanded cells staining CD4⁺, CD25^{hi}, CD127^{-/dim} and FoxP3 positive (FIG. 1A). Post expansion the cells retained function as they were able to robustly suppress the proliferation of CD4⁺CD25⁻ cells in vitro in an unmatched donor mixed Leukocyte suppression assay (FIG. 1B). Expanded CD4⁺CD25⁺ and CD4⁺CD25⁻ cells were used or expression profiling experiments. In the case of the CD4⁺CD25⁻ cells, upregulation of CD25 was observed after expansion as expected after chronic TCR crosslinking, but importantly, these cells were not FoxP3 positive (FIG. 1A)

### Example 3

### Human Treg Gene Expression Analysis

[0501] Analysis of differential gene expression in Treg vs Thelper both resting and stimulated revealed 1704 genes that were significantly differentially expressed based on the inclusion criteria used (pvalue and log fold change). The proportion of these that are up vs down regulated is 0.2:0.8. The behavior of these genes in the differential factorial analysis of the dataset is represented as a heat map in FIG. 2. Genes were clustered together into the 7 groups (Table 6) based on clustered expression patterns, and the Treg specific gene signature is captured in T1-3, whereas the Treg and activation specific behavior is captured in T4-6. A signature of genes that are significantly differentially expressed but in response to stimulation of either Treg or Thelpers (T cell activation) is captured in A1.

TABLE 7
Group definitions for the heatmap (FIG. 2)

| | | Differ- |
|---|---|---|
| | | entially |
| | | expressed |
| Group | Inclusion Criteria: | Genes |
| T1 | Effects in CD25+ vs. CD25− for both Stimulated & | 388 |
| | Resting | |
| T2 | Effects in CD25+ vs. CD25− for Resting only | 164 |
| T3 | Effects in CD25+ vs. CD25− for Stimulated only | 334 |
| | No activation effects | |
| T4 | Effects in CD25+ vs. CD25− for Stimulated only | 177 |
| | Activation effects in both CD25+ and CD25− | |
| T5 | Effects in CD25+ vs. CD25− for Stimulated only | 235 |
| | Activation effects in CD25− only | |
| T6 | Effects in CD25+ vs. CD25− for Stimulated only | 406 |
| | Activation effects in CD25+ only | |
| Total | | 1704 |
| A1 | Stimulation effect in both CD25+ and CD25− | 649 |

### Example 4

### Cell Surface Molecule Identification

[0502] The list of genes from all T groups, groups T1 & T2 combined, and T3 to T6 combined were analyzed for the differential expression of cell surface expressed proteins which could be targets for therapeutic modulation of function or used as biomarkers. Exemplary cell surface molecules that were differentially expressed are described in Table 8 (and Tables 1-6). These results were confirmed for six biomarkers using qPCR, the results of which are shown in FIG. 3.

TABLE 8
Differenitally expressed genes

| Entrez | | | TregVsThelp | TregVsThelp | Treg | Thelp |
|---|---|---|---|---|---|---|
| ID | Gene Name | Gene Description | (Stim) | (Resting) | Activation | Activation |
| 2615 | LRRC32 | leucine rich repeat containing 32 | 3.771 | 2.290 | 3.116 | 1.388 |
| 301 | ANXA1 | annexin A1 | −3.077 | −2.875 | 1.032 | 1.242 |
| 10800 | CYSLTR1 | cysteinyl leukotriene receptor 1 | −2.684 | −3.149 | 0.502 | 0.000 |
| 79895 | ATP8B4 | ATPase, class I, type 8B, member 4 | −3.020 | −2.716 | 0.000 | 0.000 |
| 3575 | IL7R | interleukin 7 receptor | −2.642 | −3.056 | −0.869 | −1.062 |
| 959 | CD40LG | CD40 ligand | −2.646 | −2.991 | 2.705 | 2.361 |
| 255231 | MCOLN2 | mucolipin 2 | −2.942 | −2.407 | 0.000 | 0.577 |
| 1493 | CTLA4 | cytotoxic T-lymphocyte-associated protein 4 | 2.112 | 2.755 | 1.126 | 1.714 |
| 2153 | F5 | coagulation factor V (proaccelerin, labile factor) | 2.269 | 2.401 | 0.897 | 1.000 |
| 225 | ABCD2 | ATP-binding cassette, sub-family D (ALD), member 2 | −2.306 | −2.228 | −0.891 | −0.987 |
| 3554 | IL1R1 | interleukin 1 receptor, type I | 2.724 | 1.708 | 1.688 | 0.000 |
| 3673 | ITGA2 | integrin, alpha 2 (CD49B, alpha 2 subunit of VLA-2 receptor) | −2.265 | −1.903 | 1.637 | 1.898 |
| 342372 | PKD1L3 | polycystic kidney disease 1-like 3 | 1.839 | 2.107 | 0.000 | 0.000 |
| 22914 | KLRK1 | killer cell lectin-like receptor subfamily K, member 1 | −1.716 | −2.091 | 0.000 | 0.000 |
| 201633 | TIGIT | T cell immunoreceptor with Ig and ITIM domains | 3.798 | 0.000 | 2.441 | 1.072 |
| 973 | CD79A | CD79a molecule, immunoglobulin-associated alpha | 1.797 | 1.914 | 0.000 | 0.000 |
| 11314 | CD300A | CD300a molecule | −1.437 | −2.180 | 0.000 | 0.000 |
| 3672 | ITGA1 | integrin, alpha 1 | −1.674 | −1.930 | 0.000 | 0.000 |
| 11001 | SLC27A2 | solute carrier family 27 (fatty acid transporter), member 2 | −1.993 | −1.586 | 1.593 | 1.646 |
| 4818 | NKG7 | natural killer cell group 7 sequence | −1.660 | −1.885 | 0.000 | 0.000 |
| 5787 | PTPRB | protein tyrosine phosphatase, receptor type, B | 1.686 | 1.856 | 0.000 | 0.000 |
| 29126 | CD274 | CD274 molecule | −1.676 | −1.802 | 0.000 | 0.000 |
| 55784 | MCTP2 | multiple C2 domains, transmembrane 2 | −1.966 | −1.502 | −0.612 | 0.000 |
| 4907 | NT5E | 5′-nucleotidase, ecto (CD73) | −1.778 | −1.609 | 0.993 | 0.000 |
| 84002 | B3GNT5 | UDP-GlcNAc:betaGal beta-1,3-N-acetylglucosaminyltransferase 5 | −3.335 | 0.000 | 1.891 | 4.471 |
| 160365 | CLECL1 | C-type lectin-like 1 | −1.841 | −1.468 | 0.000 | 0.000 |
| 3460 | IFNGR2 | interferon gamma receptor 2 (interferon gamma transducer 1) | 1.685 | 1.622 | 0.000 | 0.000 |
| 23365 | ARHGEF12 | Rho guanine nucleotide exchange factor (GEF) 12 | −1.764 | −1.445 | 0.000 | 0.000 |
| 11031 | RAB31 | RAB31, member RAS oncogene family | 1.537 | 1.667 | 0.000 | 0.000 |
| 928 | CD9 | CD9 molecule | −1.772 | −1.420 | 0.000 | 0.000 |
| 10371 | SEMA3A | sema domain, immunoglobulin domain (Ig), short basic domain, | −1.443 | −1.672 | 0.000 | 0.523 |
| | | secreted, (semaphorin) 3A | | | | |
| 3570 | IL6R | interleukin 6 receptor | 1.315 | 1.796 | −0.699 | 0.000 |
| 54947 | LPCAT2 | lysophosphatidylcholine acyltransferase 2 | −1.437 | −1.664 | 0.000 | 0.000 |
| 10252 | SPRY1 | sprouty homolog 1, antagonist of FGF signaling (Drosophila) | −1.823 | −1.270 | 3.650 | 3.738 |
| 8828 | NRP2 | neuropilin 2 | −1.424 | −1.588 | 0.000 | 0.000 |
| 5924 | RASGRF2 | Ras protein-specific guanine nucleotide-releasing factor 2 | −1.427 | −1.566 | 0.000 | 0.000 |
| 219790 | RTKN2 | rhotekin 2 | 1.449 | 1.538 | 0.000 | 0.000 |
| 221476 | PI16 | peptidase inhibitor 16 | 1.334 | 1.633 | 0.000 | 0.000 |
| 1880 | GPR183 | G protein-coupled receptor 183 | −1.872 | −1.089 | 0.656 | 1.743 |
| 10000 | AKT3 | v-akt murine thymoma viral oncogene homolog 3 (protein | −1.700 | −1.208 | 0.000 | 0.000 |
| | | kinase B, gamma) | | | | |
| 54674 | LRRN3 | leucine rich repeat neuronal 3 | −1.279 | −1.609 | 0.000 | 0.000 |
| 57476 | GRAMD1B | GRAM domain containing 1B | −1.567 | −1.310 | 0.000 | 0.000 |
| 6809 | STX3 | syntaxin 3 | −1.319 | −1.555 | −0.506 | −0.542 |
| 945 | CD33 | CD33 molecule | 1.350 | 1.505 | 0.000 | 0.000 |
| 79901 | CYBRD1 | cytochrome b reductase 1 | −1.172 | −1.671 | 0.000 | 0.000 |
| 92 | ACVR2A | activin A receptor, type IIA | −1.377 | −1.433 | 0.000 | 0.000 |
| 57493 | HEG1 | HEG homolog 1 (zebrafish) | −1.721 | −1.071 | 0.589 | 1.316 |
| 3717 | JAK2 | Janus kinase 2 (a protein tyrosine kinase) | −1.642 | −1.139 | 0.000 | 0.000 |
| 4162 | MCAM | melanoma cell adhesion molecule | 1.489 | 1.263 | 0.000 | 0.000 |
| 114801 | TMEM200A | transmembrane protein 200A | −1.086 | −1.638 | 0.000 | 0.000 |
| 4067 | LYN | v-yes-1 Yamaguchi sarcoma viral related oncogene homolog | −1.350 | −1.349 | 0.000 | 0.000 |
| 6272 | SORT1 | sortilin 1 | −1.527 | −1.126 | 0.000 | 0.000 |
| 55512 | SMPD3 | sphingomyelin phosphodiesterase 3, neutral membrane | 1.317 | 1.309 | −0.554 | 0.000 |
| | | (neutral sphingomyelinase II) | | | | |
| 131450 | CD200R1 | CD200 receptor 1 | −1.233 | −1.383 | 0.000 | 0.000 |
| 55283 | MCOLN3 | mucolipin 3 | −1.387 | −1.204 | 0.000 | 0.000 |
| 3684 | ITGAM | integrin, alpha M (complement component 3 receptor 3 | 1.197 | 1.392 | 0.000 | 0.000 |
| | | subunit) | | | | |
| 356 | FASLG | Fas ligand (TNF superfamily, member 6) | −2.588 | 0.000 | 1.187 | 3.273 |
| 10100 | TSPAN2 | tetraspanin 2 | −1.465 | −1.111 | 0.000 | 0.787 |
| 255324 | EPGN | epithelial mitogen homolog (mouse) | −1.335 | −1.238 | 0.000 | 0.000 |
| 360 | AQP3 | aquaporin 3 (Gill blood group) | 1.078 | 1.482 | 0.000 | 0.000 |
| 338596 | ST8SIA6 | ST8 alpha-N-acetyl-neuraminide alpha-2,8-sialyltransferase 6 | 1.079 | 1.471 | −0.541 | 0.000 |
| 8611 | PPAP2A | phosphatidic acid phosphatase type 2A | −1.309 | −1.234 | 0.000 | 0.000 |
| 10018 | BCL2L11 | BCL2-like 11 (apoptosis facilitator) | −0.928 | −1.567 | 1.798 | 1.487 |
| 3958 | LGALS3 | Lectin, galactoside-binding, soluble, 3 | 1.041 | 1.427 | 0.000 | 0.000 |
| 57091 | CASS4 | Cas scaffolding protein family member 4 | −1.040 | −1.426 | 0.000 | 0.000 |
| 8600 | TNFSF11 | Tumor necrosis factor (ligand) superfamily, member 11 | −1.676 | −0.782 | 0.621 | 1.589 |
| 3655 | ITGA6 | integrin, alpha 6 | 0.950 | 1.498 | −0.841 | 0.000 |
| 7133 | TNFRSF1B | Tumor necrosis factor receptor superfamily, member 1B | 1.441 | 0.977 | 0.754 | 0.000 |
| 535 | ATP6V0A1 | ATPase, H+ transporting, lysosomal V0 subunit a1 | 1.215 | 1.155 | 0.000 | 0.000 |
| 51599 | LSR | lipolysis stimulated lipoprotein receptor | 1.440 | 0.923 | 0.000 | 0.000 |
| 84830 | C6orf105 | chromosome 6 open reading frame 105 | 1.069 | 1.268 | 0.000 | 0.000 |
| 634 | CEACAM1 | carcinoembryonic antigen-related cell adhesion molecule 1 | 1.188 | 1.147 | 0.000 | 0.000 |
| | | (biliary glycoprotein) | | | | |
| 23555 | TSPAN15 | tetraspanin 15 | 1.081 | 1.247 | 0.000 | 0.000 |
| 8743 | TNFSF10 | Tumor necrosis factor (ligand) superfamily, member 10 | −1.224 | −1.099 | −1.120 | 0.000 |
| 23208 | SYT11 | synaptotagmin XI | −1.109 | −1.189 | 0.000 | 0.000 |
| 115727 | RASGRP4 | RAS guanyl releasing protein 4 | 1.373 | 0.915 | 0.956 | 0.000 |
| 55711 | FAR2 | fatty acyl CoA reductase 2 | −1.292 | −0.992 | 0.000 | 0.000 |
| 120425 | AMICA1 | adhesion molecule, interacts with CXADR antigen 1 | −0.974 | −1.283 | 0.000 | 0.000 |
| 4345 | CD200 | CD200 molecule | −2.238 | 0.000 | 4.146 | 6.282 |
| 6976 | TRGV3 | T cell receptor gamma variable 3 | −1.131 | −1.104 | −0.535 | 0.000 |
| 5733 | PTGER3 | prostaglandin E receptor 3 (subtype EP3) | −0.793 | −1.387 | 0.000 | 0.000 |
| 10207 | INADL | InaD-like (Drosophila) | −1.064 | −1.096 | 0.000 | 0.000 |
| 57111 | RAB25 | RAB25, member RAS oncogene family | 1.093 | 1.065 | 0.000 | 0.000 |
| 157506 | RDH10 | retinol dehydrogenase 10 (all-trans) | 0.000 | 2.087 | 1.217 | 2.724 |
| 1524 | CX3CR1 | chemokine (C-X3-C motif) receptor 1 | −0.942 | −1.132 | 0.808 | 0.000 |
| 5796 | PTPRK | protein tyrosine phosphatase, receptor type, K | −0.956 | −1.103 | 0.000 | 0.000 |
| 84636 | GPR174 | G protein-coupled receptor 174 | −0.692 | −1.347 | 0.579 | 0.000 |
| 56654 | NPDC1 | neural proliferation, differentiation and control, 1 | 1.067 | 0.970 | 0.000 | 0.000 |
| 3732 | CD82 | CD82 molecule | −1.042 | −0.993 | 0.000 | 0.000 |
| 5359 | PLSCR1 | phospholipid scramblase 1 | −1.443 | −0.583 | 0.000 | 0.585 |
| 1E+08 | LOC100132000 | Transmembrane protein ENSP00000382582 | −1.169 | −0.841 | 0.000 | 0.000 |
| 285704 | RGMB | RGM domain family, member B | 1.040 | 0.961 | 0.000 | 0.000 |
| 137835 | TMEM71 | transmembrane protein 71 | −1.168 | −0.828 | 0.000 | 0.000 |
| 84868 | HAVCR2 | hepatitis A virus cellular receptor 2 | −0.749 | −1.222 | 0.000 | 0.000 |
| 753 | C18orf1 | chromosome 18 open reading frame 1 | 1.270 | 0.693 | 0.000 | 0.000 |
| 55974 | RAG1AP1 | recombination activating gene 1 activating protein 1 | 0.781 | 1.158 | −0.738 | 0.000 |
| 2530 | FUT8 | fucosyltransferase 8 (alpha (1,6) fucosyltransferase) | −1.139 | −0.798 | 0.000 | 0.000 |
| 3382 | ICA1 | islet cell autoantigen 1, 69 kDa | 0.849 | 1.087 | 0.000 | 0.000 |
| 253782 | LASS6 | LAG1 homolog, ceramide synthase 6 | −1.098 | −0.822 | 0.000 | 0.000 |
| 7097 | TLR2 | toll-like receptor 2 | −0.994 | −0.903 | 0.000 | 0.000 |
| 2838 | GPR15 | G protein-coupled receptor 15 | −0.541 | −1.330 | 0.000 | 0.000 |
| 79815 | NPAL2 | NIPA-like domain containing 2 | 0.897 | 0.973 | −0.580 | 0.000 |
| 6403 | SELP | selectin P (granule membrane protein 140 kDa, antigen CD62) | 0.865 | 1.000 | 0.000 | 0.000 |
| 1235 | CCR6 | chemokine (C-C motif) receptor 6 | 0.793 | 1.069 | −0.806 | 0.000 |
| 8573 | CASK | calcium/calmodulin-dependent serine protein kinase (MAGUK | 0.863 | 0.984 | 0.000 | 0.000 |
| | | family) | | | | |
| 11010 | GLIPR1 | GLI pathogenesis-related 1 | −0.778 | −1.058 | 0.000 | 0.000 |
| 166752 | FREM3 | FRAS1 related extracellular matrix 3 | 0.829 | 0.992 | 0.000 | 0.000 |
| 9455 | HOMER2 | homer homolog 2 (Drosophila) | −0.809 | −1.005 | 0.000 | 0.000 |
| 2047 | EPHB1 | EPH receptor B1 | 0.990 | 0.818 | 0.000 | 0.000 |
| 56253 | CRTAM | cytotoxic and regulatory T cell molecule | −1.800 | 0.000 | 0.809 | 2.400 |
| 9976 | CLEC2B | C-type lectin domain family 2, member B | −0.954 | −0.832 | 0.000 | 0.000 |
| 51301 | GCNT4 | glucosaminyl (N-acetyl) transferase 4, core 2 (beta-1,6-N- | 0.000 | 1.779 | −0.790 | 0.000 |
| | | acetylglucosaminyltransferase) | | | | |
| 5141 | PDE4A | phosphodiesterase 4A, cAMP-specific (phosphodiesterase E2 | −0.588 | −1.180 | 0.000 | −0.713 |
| | | dunce homolog, Drosophila) | | | | |
| 151888 | BTLA | B and T lymphocyte associated | −1.766 | 0.000 | 1.957 | 3.580 |
| 10333 | TLR6 | toll-like receptor 6 | 0.651 | 1.106 | −0.820 | 0.000 |
| 5168 | ENPP2 | ectonucleotide pyrophosphatase/phosphodiesterase 2 | −1.754 | 0.000 | 1.695 | 2.169 |
| 23654 | PLXNB2 | Plexin B2 | 0.923 | 0.816 | 0.000 | 0.000 |
| 26762 | HAVCR1 | hepatitis A virus cellular receptor 1 | −0.833 | −0.895 | 0.000 | 0.000 |
| 5054 | SERPINE1 | serpin peptidase inhibitor, clade E (nexin, plasminogen activator | −1.725 | 0.000 | 0.633 | 2.354 |
| | | inhibitor type 1), member 1 | | | | |
| 57205 | ATP10D | ATPase, class V, type 10D | −0.883 | −0.838 | 0.000 | 0.000 |
| 3559 | IL2RA | interleukin 2 receptor, alpha | 0.611 | 1.102 | 0.552 | 0.970 |
| 8870 | IER3 | immediate early response 3 | −1.696 | 0.000 | 0.537 | 1.439 |
| 4033 | LRMP | lymphoid-restricted membrane protein | −0.939 | −0.750 | −0.788 | 0.000 |
| 4040 | LRP6 | low density lipoprotein receptor-related protein 6 | 0.607 | 1.078 | 0.000 | 0.000 |
| 1363 | CPE | carboxypeptidase E | 1.023 | 0.662 | 0.000 | 0.000 |
| 30061 | SLC40A1 | Solute carrier family 40 (iron-regulated transporter), member 1 | −0.835 | −0.848 | 0.000 | −0.509 |
| 8792 | TNFRSF11A | Tumor necrosis factor receptor superfamily, member 11a, NFKB | 0.969 | 0.694 | 0.000 | 0.000 |
| | | activator | | | | |
| 57705 | WDFY4 | WDFY family member 4 | 0.875 | 0.778 | 0.000 | 0.000 |
| 926 | CD8B | CD8b molecule | 0.698 | 0.949 | 0.000 | 0.000 |
| 5734 | PTGER4 | prostaglandin E receptor 4 (subtype EP4) | −0.579 | −1.038 | 1.575 | 1.372 |
| 114836 | SLAMF6 | SLAM family member 6 | −1.615 | 0.000 | −0.630 | 0.652 |
| 2207 | FCER1G | Fc fragment of IgE, high affinity I, receptor for; gamma | 1.604 | 0.000 | 0.000 | 0.000 |
| | | polypeptide | | | | |
| 340547 | VSIG1 | V-set and immunoglobulin domain containing 1 | 0.638 | 0.957 | −0.710 | 0.000 |
| 6812 | STXBP1 | syntaxin binding protein 1 | −0.940 | −0.624 | 0.000 | 0.000 |
| 64065 | PERP | PERP, TP53 apoptosis effector | 0.582 | 0.973 | 0.000 | 0.000 |
| 56913 | C1GALT1 | core 1 synthase, glycoprotein-N-acetylgalactosamine 3-beta- | −0.911 | −0.644 | 0.000 | 0.000 |
| | | galactosyltransferase, 1 | | | | |
| 347902 | AMIGO2 | adhesion molecule with Ig-like domain 2 | −0.936 | −0.598 | 1.034 | 1.425 |
| 29097 | CNIH4 | cornichon homolog4 (Drosophila) | −0.994 | −0.527 | 0.000 | 0.000 |
| 9743 | RICS | Rho GTPase-activating protein | −0.885 | −0.624 | 0.000 | 0.000 |
| 25945 | PVRL3 | poliovirus receptor-related 3 | −0.964 | −0.543 | 0.627 | 1.165 |
| 8477 | GPR65 | G protein-coupled receptor 65 | −0.698 | −0.782 | 0.000 | 0.000 |
| 10855 | HPSE | heparanase | 0.610 | 0.854 | 0.000 | 0.613 |
| 55061 | SUSD4 | sushi domain containing 4 | 0.000 | −1.454 | 0.000 | 0.000 |
| 5743 | PTGS2 | prostaglandin-endoperoxide synthase 2 (prostaglandin G/H | −1.453 | 0.000 | 4.352 | 5.552 |
| | | synthase and cyclooxygenase) | | | | |
| 54843 | SYTL2 | synaptotagmin-like 2 | −1.453 | 0.000 | 0.000 | 0.000 |
| 55103 | RALGPS2 | Ral GEF with PH domain and SH3 binding motif 2 | −0.835 | −0.594 | 0.000 | 0.000 |
| 8807 | IL18RAP | interleukin 18 receptor accessory protein | −1.429 | 0.000 | 1.534 | 1.950 |
| 92691 | TMEM169 | transmembrane protein 169 | 0.682 | 0.744 | −0.904 | −0.877 |
| 54947 | LPCAT2 | lysophosphatidylcholine acyltransferase 2 | −1.437 | −1.664 | 0.000 | 0.000 |

### Example 6

### Low Density Array Analysis of Gene Expression

[0503] FIGS. 5A to 5D show results of some low density array experiments to assess the expression of various biomarkers by stimulated nTreg cells compared to stimulated Thelper cells (FIGS. 5A and 5B) or resting nTreg cells compared to resting Thelper cells (FIGS. 5C and 5D).

[0504] A summary of the data obtained high density arrays and additional low density arrays is shown in Table 9.

TABLE 9
Summary of results from array screening
and low density array experiments

| | Log Fold Change | | Log Fold Change | | Low Density | |
|---|---|---|---|---|---|---|
| | Treg vs | Treg vs | Treg | Th | Array Value | |
| Gene Name | Th(stim) | Th(rest) | Act. | Act. | stim | rest |

Upregulated genes

| | | | | | | |
|---|---|---|---|---|---|---|
| PI16 | 1.33 | 1.63 | 0 | 0 | 72.55 | 62.82 |
| CD121 | 2.72 | 1.71 | 1.69 | 0 | 128.51 | 401.83 |
| PKD1L3 | 1.84 | 2.11 | 0 | 0 | 23.26 | 15.06 |
| PTPRB | 1.69 | 1.86 | 0 | 0 | 26.47 | 18.49 |
| CD146 | 1.49 | 1.26 | 0 | 0 | 7.06 | 6.57 |
| IL6R | 1.32 | 1.80 | −0.70 | 0 | 7.53 | 8.09 |
| C18orf1 | 1.27 | 0.69 | 0 | 0 | 2.04 | 1.59 |
| AQP3 | 1.08 | 1.48 | 0 | 0 | 2.36 | 2.26 |
| RGMB | 1.04 | 0.96 | 0 | 0 | 98.29 | 76.93 |
| CD49f | 0.95 | 1.50 | −0.84 | 0 | 3.87 | 4.08 |
| PERP | 0.58 | 0.97 | 0 | 0 | 3.56 | 4.28 |
| LSR | 1.44 | 0.92 | 0 | 0 | 17.66 | 10.36 |
| TIGIT | 3.80 | 0 | 2.44 | 1.07 | 30.23 | 29.82 |
| WDFY4 | 0.88 | 0.78 | 0 | 0 | 109.62 | 24.84 |
| ATP6V0A1 | 1.22 | 1.16 | 0 | 0 | 3.32 | 3.15 |
| ST8SIA6 | 1.08 | 1.47 | −0.54 | 0 | 7.05 | 4.30 |
| C6orf105 | 1.07 | 1.27 | 0 | 0 | 3.71 | 9.52 |
| NPAL2 | 0.90 | 0.97 | −0.58 | 0 | 2.32 | 2.26 |
| TMEM169 | 0.68 | 0.74 | −0.90 | −0.88 | 1.65 | 1.79 |
| FREM3 | 0.83 | 0.99 | 0 | 0 | | |
| EPHB1 | 0.99 | 0.82 | 0 | 0 | 41.78 | 54.08 |
| FCER1G | 1.60 | 0 | 0 | 0 | 4.56 | 4.10 |
| TSPAN15 | 1.08 | 1.25 | 0 | 0 | 4.74 | 4.51 |
| PLXNB2 | 0.92 | 0.82 | 0 | 0 | 2.26 | 2.25 |
| VSIG1 | 0.64 | 0.96 | −0.71 | 0 | 1.67 | 1.62 |
| NPDC1 | 1.07 | 0.97 | 0 | 0 | 4.84 | 4.72 |
| CD79A | 1.80 | 1.91 | 0 | 0 | 15.40 | 13.95 |
| IFNgR2 | 1.69 | 1.62 | 0 | 0 | 8.54 | 7.92 |
| CD33 | 1.35 | 1.51 | 0 | 0 | 14.78 | 13.74 |
| CD11B | 1.20 | 1.39 | 0 | 0 | 3.81 | 3.27 |
| CD66 | 1.19 | 1.15 | 0 | 0 | 4.62 | 4.66 |
| CD79B | 0.74 | 0.81 | −0.70 | 0 | 2.01 | 1.94 |
| CD8B | 0.70 | 0.95 | 0 | 0 | 2.31 | 1.82 |
| TLR6 | 0.65 | 1.11 | −0.82 | 0 | 3.81 | 3.07 |
| LRP6 | 0.61 | 1.08 | 0 | 0 | 2.64 | 2.51 |
| SMPD3 | 1.32 | 1.31 | −0.55 | 0 | 4.32 | 4.50 |
| F5 | 2.27 | 2.40 | 0.90 | 1.00 | | |
| RAB31 | 1.54 | 1.67 | 0 | 0 | | |
| RTKN2 | 1.45 | 1.54 | 0 | 0 | | |
| RASGRP4 | 1.37 | 0.92 | 0.96 | 0 | | |
| RAB25 | 1.09 | 1.07 | 0 | 0 | | |
| CPE | 1.02 | 0.66 | 0 | 0 | | |
| CASK | 0.86 | 0.98 | 0 | 0 | | |
| ICA1 | 0.85 | 1.09 | 0 | 0 | | |
| TJP3 | 0.79 | 0.75 | 0 | 0 | | |
| RAG1AP1 | 0.78 | 1.16 | −0.74 | 0 | | |
| HPSE | 0.61 | 0.85 | 0 | 0.61 | | |

Downregulated genes

| | | | | | | |
|---|---|---|---|---|---|---|
| ATP8B4 | −3.020 | −2.716 | 0.000 | 0.000 | −4.86 | −5.56 |
| MCOLN2 | −2.94 | −2.41 | 0 | 0.58 | −5.02 | −4.78 |
| CYSLTR1 | −2.684 | −3.149 | 0.502 | 0.000 | −6.73 | −7.35 |
| ITGA2 | −2.265 | −1.903 | 1.637 | 1.898 | −1.77 | −7.58 |
| GPR183 | −1.872 | −1.089 | 0.656 | 1.743 | −2.31 | −1.59 |
| CLECL1 | −1.84 | −1.47 | 0 | 0 | −1.78 | −2.27 |
| CRTAM | −1.800 | 0.000 | 0.809 | 2.400 | −3.65 | −4.13 |
| CD9 | −1.772 | −1.420 | 0.000 | 0.000 | −2.01 | −2.23 |
| ENPP2 | −1.754 | 0.000 | 1.695 | 2.169 | −7.27 | −13.33 |
| HEG1 | −1.72 | −1.07 | 0.59 | 1.32 | −2.51 | −1.48 |
| IER3 | −1.70 | 0 | 0.54 | 1.44 | −1.47 | −1.14 |
| CD274 | −1.676 | −1.802 | 0.000 | 0.000 | −1.74 | −3.31 |
| ITGA1 | −1.674 | −1.930 | 0.000 | 0.000 | −7.55 | −7.58 |
| NKG7 | −1.66 | −1.89 | 0 | 0 | −1.59 | −1.77 |
| SLAMF6 | −1.615 | 0.000 | −0.630 | 0.652 | −1.43 | −1.02 |
| SORT1 | −1.527 | −1.126 | 0.000 | 0.000 | −3.13 | −3.27 |
| TSPAN2 | −1.465 | −1.111 | 0.000 | 0.787 | −2.65 | −3.83 |
| LPCAT2 | −1.44 | −1.66 | 0 | 0 | −1.79 | −1.82 |
| PLSCR1 | −1.443 | −0.583 | 0.000 | 0.585 | −1.27 | −1.10 |
| SEMA3A | −1.443 | −1.672 | 0.000 | 0.523 | −17.53 | −40.00 |
| CD300A | −1.437 | −2.180 | 0.000 | 0.000 | −3.07 | −3.44 |
| NRP2 | −1.424 | −1.588 | 0.000 | 0.000 | −4.60 | −3.83 |
| MCOLN3 | −1.387 | −1.204 | 0.000 | 0.000 | −2.51 | −3.09 |
| ACVR2A | −1.377 | −1.433 | 0.000 | 0.000 | −3.43 | −3.68 |
| EPGN | −1.335 | −1.238 | 0.000 | 0.000 | −5.60 | −2.35 |
| STX3 | −1.32 | −1.56 | −0.51 | −0.54 | −1.90 | −2.07 |
| LRRN3 | −1.28 | −1.61 | 0 | 0 | −3.96 | −6.13 |
| CD200R1 | −1.233 | −1.383 | 0.000 | 0.000 | −2.57 | −2.29 |
| CYBRD1 | −1.172 | −1.671 | 0.000 | 0.000 | −2.27 | −3.04 |
| TMEM71 | −1.17 | −0.83 | 0 | 0 | −1.47 | −1.51 |
| LASS6 | −1.098 | −0.822 | 0.000 | 0.000 | −1.74 | −1.78 |
| TMEM200A | −1.086 | −1.64 | 0 | 0 | −4.87 | −4.98 |
| CD82 | −1.042 | −0.993 | 0.000 | 0.000 | −1.34 | −1.55 |
| CNIH4 | −0.994 | −0.527 | 0.000 | 0.000 | −1.02 | −1.11 |
| PVRL3 | −0.964 | −0.543 | 0.627 | 1.165 | −1.73 | −1.90 |
| PTPRK | −0.956 | −1.103 | 0.000 | 0.000 | −8.25 | −8.93 |
| CLEC2B | −0.954 | −0.832 | 0.000 | 0.000 | −1.25 | −1.53 |
| LRMP | −0.94 | −0.75 | −0.79 | 0 | −1.19 | −1.19 |
| AMIGO2 | −0.936 | −0.598 | 1.034 | 1.425 | −1.83 | −1.23 |
| C1GALT1 | −0.911 | −0.644 | 0.000 | 0.000 | −1.14 | −1.68 |
| ATP10D | −0.88 | −0.84 | 0 | 0 | −1.36 | −1.40 |
| RALGPS2 | −0.835 | −0.594 | 0.000 | 0.000 | −1.51 | −2.00 |
| PTGER3 | −0.793 | −1.387 | 0.000 | 0.000 | −3.28 | −4.22 |
| GPR174 | −0.69 | −1.35 | 0.58 | 0.00 | −2.01 | −2.64 |
| SUSD4 | 0.000 | −1.454 | 0.000 | 0.000 | −21.49 | −24.39 |
| IL18RAP | −1.429 | 0.000 | 1.534 | 1.950 | −1.22 | |
| PPAP2A | −1.309 | −1.234 | 0.000 | 0.000 | | |
| AMICA1 | −0.974 | −1.283 | 0.000 | 0.000 | | |
| GLIPR1 | −0.778 | −1.058 | 0.000 | 0.000 | | |
| GPR65 | −0.698 | −0.782 | 0.000 | 0.000 | | |
| GPR15 | −0.541 | −1.330 | 0.000 | 0.000 | | |

### Example 7

### Validation of Biomarkers by Flow Cytometry

[0505] Biomarkers identified by microarray were screened with commercially available antibodies (where possible monoclonal antibodies (mAb) were chosen due to their increased specificity compared to polyclonal antibodies). Due to the broader specificity of polyclonal antibodies (pAb) and the relatively high background of rabbit and goat pAb, not all targets could be validated by flow cytometry. The targets for which the antibody reagents were robust and the backgrounds low are summarized in the tables below.

[0506] Screening Strategy:

[0507] 1) Targets are screened for surface expression on T lymphocytes (test antibody/CD3).

[0508] 2) If positive, targets are screened for Treg staining (test antibody/CD4+/CD25++/CD127−).

[0509] 3) If targets pass 2) correlation with FoxP3 is analyzed (test antibody/CD4+/CD25++/FoxP3).

[0510] Results of these screens are included in Tables 10-12.

TABLE 10
Results of Stage 1 of the Screening Strategy

| | Type of | |
|---|---|---|
| Target | Antibody | Staining Pattern Observed |
| AQP3 | pAb | ~20% of CD3⁺ lymphocytes |
| C18orf1 | pAb | ~30% of CD3⁺ lymphocytes |
| CD11b | mAb | distinct population; on ~12% of |
| | | CD3⁺ lymphocytes |
| CD121 | mAb | distinct population; on ~1% of |
| | | CD3⁺ lymphocytes |
| CD146 | mAb | distinct population; consistent on 2-7% of CD3⁺ |
| | | cells |
| CD33 | mAb | ~0.2% of CD3⁺ lymphocytes |
| CD49f | mAb | ~70% of CD3⁺ lymphocytes |
| CD66 | mAb | distinct population; on ~20-30% of |
| | | CD3⁺ lymphocytes |
| CD8B | mAb | distinct population; on ~12% of |
| | | CD3⁺ lymphocytes |
| IFNgR2 | mAb | ~0.2-2% of CD3⁺ lymphocytes |
| LRP6 | mAb | ~1-4% of CD3⁺ lymphocytes |
| LSR | pAb | ~50% of CD3⁺ lymphocytes |
| PERP | pAb | ~2-6% of CD3⁺ lymphocytes |
| PI16 | mAb | distinct population; consistent on ~10% of |
| | | CD3⁺ lymphocytes |
| PKD1L3 | pAb | on ~50% of CD3⁺ lymphocytes |
| PTPRB | pAb | distinct population; on ~15% of |
| | | CD3⁺ lymphocytes |
| TLR6 | mAb | on ~50% of CD3⁺ lymphocytes |
| TSPAN15 | pAb | on ~0.1% of CD3⁺ lymphocytes |

TABLE 11
Results of Stage 2 of the Screening Strategy

| Target | Staining Pattern Observed |
|---|---|
| AQP3 | 0.1% of CD4+; |
| | 1.2% of CD4+CD25++; enriched on CD4+CD25++CD127− |
| C18orf1 | 0.7% of CD4+; |
| | 0.8% of CD4+CD25++; enriched on CD4+CD25++CD127− |
| CD121 | 0.3% of CD4+; |
| | 3.8% of CD4+CD25++; enriched on CD4+CD25++CD127− |
| CD146 | 0.6% of CD4+; |
| | 1.2% of CD4+CD25++; enriched on CD4+CD25++CD127− |
| CD49f | 8% of CD4+; |
| | 8.8% of CD4+CD25++; enriched on CD4+CD25++CD127− |
| LRP6 | 0.1% of CD4+; 0.1% of CD4+CD25++ |
| LSR | 0.6% of CD4+; |
| | 1.2% of CD4+CD25++; enriched on CD4+CD25++CD127− |
| PERP | 0.3% of CD4+; |
| | 0.7% of CD4+CD25++; enriched on CD4+CD25++CD127− |
| PI16 | 5% of CD4+; |
| | 12% of CD4+CD25++; enriched on CD4+CD25++CD127− |
| PKD1L3 | 5.4% of CD4+; 4.6% of CD4+CD25++ |
| PTPRB | 0.3% of CD4+; |
| | 4% of CD4+CD25++; enriched on CD4+CD25++CD127− |

TABLE 12
Results of Stage 3 of the Screening Strategy

| Target | Staining Pattern Observed |
|---|---|
| AQP3 | CD4+CD25++AQP3+ express FoxP3 |
| C18orf1 | CD4+CD25++C18orf1+ express FoxP3 |
| CD121 | CD4+CD25++CD121+ express FoxP3 |
| CD146 | CD4+CD25++CD146+ express FoxP3 |
| CD49f | CD4+CD25++CD49f+ express FoxP3 |
| PERP | CD4+CD25++PERP+ express FoxP3 |
| PI16 | CD4+CD25++PI16+ express FoxP3 |
| PKD1L3 | CD4+CD25++PKD1L3+ show weak FoxP3 expression |
| PTPRB | CD4+CD25++PTPRB+ express FoxP3 |

All targets that are enriched on CD4+CD25++CD127− Treg also express FoxP3.

### Example 8

### Analysis of PI16 expression on Treg Cells

[0511] To identify biomarker that could be used as a surrogate for FoxP3 expression, cell surface proteins were screened to identify those that were up-regulated on Treg cells. In particular, CD25 positive adult CD4⁺ cells were screened for co-expression of PI16 and FoxP3 using a polyclonal anti-PI16 antibody (FIG. 6). This antibody stained approximately 15% of lymphocytes, the majority of which were also CD4⁺ (˜12%). To confirm that PI16 was expressed by Treg cells, cells were stained with antibodies against CD4, CD25 and FoxP3 in addition to the PI16 antibody. As shown in FIG. 6, more than 50% of CD25^{bright} PI16⁺ cells also expressed FoxP3 and PI16 was found to have a positive correlation with FoxP3.

[0512] The expression of PI16 was also tested on TGFβ induced Treg (iTreg; FIG. 7). While TGFβ substantially up-regulated CD25 and FoxP3 expression, PI16 was not substantially expressed on these transiently induced cells, suggesting that PI16 expression may discriminate natural Treg from induced Treg.

[0513] FIG. 8 also shows that PI16 is expressed by cells expressing a Treg phenotype, i.e., CD4⁺CD25^{hi}CD127⁻.

[0514] FIG. 9 shows that antibody against PI16 binds to a population of memory Treg cells. Briefly, PBMC were labeled with antibodies to CD4, CD45RA, CD45R0, CD25 and the polyclonal anti-PI16 antibody. Staining of CD45RA is widely used to distinguish memory cells from naïve cells with CD45RA-negative cells belonging to the memory cell subset. Thus, PI16 appears to identify a population of CD4⁺CD25⁺CD45RA⁻CD45R0⁺ memory Treg cells.

[0515] PI16 was also readily detectable on the surface of resting and stimulated nTreg cells (FIG. 10). In particular, on resting Treg a significant portion (85%) of the CD4⁺CD25^{bright}FoxP3⁺ cells were PI16 positive, and the majority (˜70%) of the PI16⁺ cells co-express FoxP3, with only ˜15% FoxP3⁺PI16⁻ (FIG. 10 Left Hand Panel ii). Resting CD25⁻ cells were not significantly FoxP3⁺, and there are ˜20% PI16⁺CD25⁻ cells (FIG. 10A Left Hand Panel iii) detected. Upon isolation of CD4⁺CD25⁺ cells and overnight stimulation, approximately 80% of the PI16⁺ cells co express PI16 and FoxP3, although approximately 40% of the activated FoxP3⁺cells are PI16 negative (FIG. 10 Right Hand Panel c). Importantly, stimulated CD4⁺CD25⁻ cells do not express significant amounts of PI16 or FoxP3

### Example 9

### Production of Monoclonal Antibodies

[0516] A monoclonal antibody that specifically binds to a protein set forth in Table 4 is produced using methods known in the art. Briefly, a recombinant protein or a cell expressing said protein is administered to female Balb/c mice or Xenomouse™. Non-immune serum samples are taken from all mice prior to the first immunization. Groups of mice are initially immunized by the sub-cutaneous injection. Two weeks later, the mice are boosted by injection with sub-cutaneous injection. A test bleed is taken six days after the second injection, and is screened for reactivity as described below. About fourteen days later the mice are given a final boost, and four days later they are sacrificed and the spleens collected for preparing hybridomas.

[0517] For fusions, hybridoma cells are generated following the instructions of Macardle and Bailey (2006) using about 10⁸ mouse spleen cells and about 10⁷ SP2/0 myeloma cells (ratio about 10:1).

[0518] Hybridoma cells from selected wells are screened on PBMC and/or cells expressing the protein of interest and/or recombinant protein, expanded and cloned by single-cell sorting using a FACSAria II cell sorter equipped with an ACDU (BD Biosciences). Colonies arising from the sorted cells are screened by flow cytometry again.

[0519] Hybridoma cells from selected wells are expanded and re-cloned by single-cell sorting. Colonies arising from the sorted cells are screened by flow cytometry for the expression of antibodies with similar reactivity with PBMC and/or cells expressing the protein of interest and/or recombinant protein as the parent hybridoma.

### Example 10

### Determining the Level of Treg Cells in a Biological Sample

[0520] Monoclonal antibodies essentially as described in Example 9 and/or commercially available antibodies, e.g., for sources described herein are used in the production of a two-site ELISA to determine the level of a protein expressed on Treg cells in a biological sample.

[0521] Generally this method comprises capturing Treg cells with a monoclonal antibody against one protein described herein and detecting those cells with an antibody against a different protein or lysing cells and capturing with an antibody against one epitope in a protein and detecting with an antibody against a different epitope against the same protein.

[0522] A capture antibody absorbed to a microtitre plate at about 20° C. for about 16 hours. Plates are then washed and blocked.

[0523] A test sample or a control sample comprising a known amount of Treg cells or protein is contacted to the immobilized protein. A further control is cord blood derived stimulated/unstimulated sorted Treg (e.g., isolated based on expression of FoxP3 and/or CD25 and/or CD4)

[0524] The detection monoclonal antibody is conjugated to, e.g., horseradish peroxidase (HRP) using a HRP conjugation kit (e.g., Alpha Diagnostics International, Inc., San Antonio, Tex., USA).

[0525] Following washing of the microtitre plates, the HRP conjugated monoclonal antibody is added to each well of the plate and incubated. Plates are then washed and ABTS (Sigma Aldrich, Sydney, Australia) is added to each well. Reactions are stopped after an appropriate time, e.g., approximately 20 minutes. Absorbance values measured at 415 nm.

[0526] The amount of absorbance detected in negative control wells (cells or protein) is subtracted from the absorbance of each other well to determine the amount of detection antibody bound.

[0527] The amount of Treg cells or protein is also assessed in normal and/or healthy subjects and/or subjects known to suffer from, e.g., rheumatoid arthritis. Samples use include, for example, buffy coat fraction In this manner, an ELISA is produced to diagnose/prognose a Treg-associated condition, e.g., rheumatoid arthritis.

### Example 11

### Isolation of Treg Cells

[0528] Monoclonal antibodies as described in Example 9 are labeled with a fluorophore using standard techniques.

[0529] Peripheral blood mononuclear cells are resuspended in PBS in an optimally pre-titered cocktail of antibodies and incubated for about 20 minutes on ice. Labeled cells are washed in excess PBS and resuspended at about 5−10×10⁶ cells/mL and held on ice for flow cytometric analysis and sorting. Propidium iodide (PI; about 1 pg/mL), is used as a viability dye for exclusion of non-viable cells. Fluorescence activated cell sorting is performed using standard methods to isolate cells expressing a marker described herein and CD4 and CD25.

[0530] Isolated cells are cultured with soluble CD3 mAb, syngeneic APCs and IL-2 or with microbeads linked to anti-CD3 and anti-CD23 antibodies and IL-2 (e.g., as described in Levine et al., 1997).

### Example 12

### Mixed Lymphocyte Reaction

[0531] CD4⁺CD25⁻ T-cells and/or dendritic stimulator APC are cultured in 96 well U-bottom plates. Treg cells isolated by the method described in Example 11 are added for standard assays, or in graded numbers for titration experiments. Wells are pulsed on days 3, 5, 6, and 7 with ³H-thymidine for the last 16 hours of culture. All timepoints have multiple replicates. Results are expressed in counts per minute. Reduced cell proliferation relative to cells cultured in the absence of Treg cells indicates that the Treg cells are functional.

### Example 13

### 5,6-carboxy fluorescein diacetate succinimidyl ester (CFSE) Suppressor Assay

[0532] CD4⁺ T cells are indirectly isolated from buffy coats using RosetteSep CD4⁺ T cell Enrichment Kit (Stem Cell Technologies, France) prior to Ficoll density gradient centrifugation or the CD4+ T cell Isolation Kit (Miltenyi Biotech, Germany) after Ficoll density gradient centrifugation. Purified CD4+ T cells are then further separated into CD4⁺CD25^{bright} and a marker as described herein and CD4⁺CD25⁻ cell populations by means of high speed FACS sorting (FACS Aria II, BD Biosciences).

[0533] CD4⁺CD25⁻ T cells are labeled with 0.5 μM CFSE (Invitrogen, USA) in PBS/0.5% FCS for 15 mins at 37° C. Excess CFSE is quenched with equal volumes of FCS for 10 minutes and then cells are washed twice with ice cold PBS. CD4⁺CD25⁻ CFSE labeled T cells are cultured in 96-well round bottom plates at 1×10⁴ cells per well with 1×10⁵ irradiated PBMCs in the presence of varying amounts of Treg cells population and CD3/CD28 Dynabeads (Invitrogen) in RPMI with 10% FCS. After 4 days proliferation of the CD4⁺CD25⁻ CFSE labeled T cells are analysed by flow cytometry. Each CFSE signal peak represents one division cycle. The ability of Treg cells to suppress cell proliferation is assessed by comparing CFSE signal peaks of CD4⁺CD25⁻ CFSE labeled T cells with and without the presence of a regulatory cell population.

### Example 14

### Treatment of GVHD

[0534] C57B1/6 (B6; H-2^{b}), BALB/c (H-2^{d}), (B6×DBA/2 [D2])F1 (H-2^{bxd}), and C3H (H-2^{k}) are obtained. Unless otherwise stated, experiments are performed essentially as previously described in Cohen et al., 1999. Briefly, 24 h after lethal irradiation of (B6×D2)F1 (11 Gy) and B6 (10 Gy) or C3H (9.5 Gy) mice, recipients are transplanted with cells from B6 or BALB/c donor mice, respectively. The transplants are constituted of about 5×10⁶ T cell—depleted bone marrow (BM) cells, and in test cases Treg cells isolated as described in Example 11. Survival of mice is then determined, with prolonged survival in mice receiving Treg cells indicating that the cells are functional.

### Example 15

### Treatment of Rheumatoid Arthritis

[0535] DBA/1 Mice are immunized with collagen type II (CII) in complete Freund's adjuvant (CFA) and scores of arthritis recorded. Purified Treg cells are isolated and cultured as described in Example 11 and injected into the mice. Levels of anti-CII antibody and cytokines are determined in the supernatant using ELISA and Bio-Plex protein array system. Detection of the onset of arthritis and/or decreased serum levels of TNF-alpha and/or IL-6indicates that the isolated Treg cells are capable of treating or preventing autoimmune arthritis.

### Example 16

### Inducing an Immune Response

[0536] Mice are administered tumor cell lines, e.g., Neuro-2A or CT26 colorectal cancer cells. Following cell administration or at the time of administration, mice are administered a monoclonal antibody as described in Example 9. A subset of mice are also administered killed cancer cells. Immune response against tumor cells is also determined using ELISA and/or ELISPOT. Survival, tumor presence, the size of tumors and/or the degree of immune response against tumors in mice administered tumor cells without antibody treatment versus mice treated with antibody alone or antibody and cell vaccine is determined. A further increase in survival or immune response and/or reducing in tumor presence or size in mice administered cells and antibodies versus antibody alone or no antibody indicates that treatment permits a stronger response to vaccine treatment.

### REFERENCES

[0537] Air, Proc. Natl. Acad. Set USA 78: 7639-7643, 1981
[0538] Arenkov et al., Anal. Biochem. 278:123-131, 2000
[0539] Asano et al, J. Exp. Med. 184:387-396, 1996
[0540] Audibert et al, Nature 289: 543, 1981
[0541] F. M. Ausubel et al., (editors), Current Protocols in Molecular Biology, Greene Pub. Associates and Wiley-Interscience (1988, including all updates until present)
[0542] Baecher-Allan et al, J. Immunol. 167:1245-1253, 2001
[0543] Barnes et al., Anal. Biochem. 102:255, 1980
[0544] Beachey, Adv. Exp. Med. Biol. 185:193, 1985
[0545] Bendele J Musculoskel Neuron Interact; 1(4):377-385, 2001
[0546] Bengtsson and Bengtsson BMC Bioinformatics 7, 96, 2006
[0547] Bengtsson and Hossjer BMC Bioinformatics 7, 100, 2006
[0548] Beaucage, et al., Tetrahedron Letters 22: 1859-1862, 1981
[0549] Berkner et al., BioTechniques 6: 616, 1988
[0550] Bolstad et al., Bioinformatics (Oxford, England) 19, 185-193, 2003
[0551] Bresatz et al., Immunol Methods 327, 53-62, 2007
[0552] Bernhard et al, Science 245: 301-304, 1989
[0553] Bhattacharya-Chatterjee et al, J of Immunospecificity. 141: 1398-1403, 1986
[0554] Bluestone et al., Nat. Rev. Immunol., 3: 253, 2000
[0555] Boerner et al., J Immunol, 147:86-95, 1991
[0556] Boyer et al., Blood, 103: 3428-3430, 2004
[0557] Bradl and Linington Brain Pathol., 6:303-311, 1996
[0558] Brennan et al, Science, 229: 81 1985
[0559] Bresslauer et al., Proc. Natl. Acad. Sci. USA, 83: 3746-3750, 1986
[0560] Brown (editor), Essential Molecular Biology: A Practical Approach, Volumes 1 and 2, IRL Press (1991)
[0561] Bzik et al, Virology 155:322-333, 1986
[0562] Cao et al., Arthritis Res. Ther., 6: R35—R46, 2004
[0563] Caron et al., J. Exp Med 176:1 191-1 195 1992
[0564] Caruthers, M. H., et al., “Methods in Enzymology,” Vol. 154, pp. 287-314 (1988)
[0565] Carter et al., Bio/Technology 10: 163-167, 1992
[0566] Chen and Okayama, Mol. Cell. Biol., 7: 2745-2752, 1987
[0567] Chen et al., Nature, 446:203-207, 2007
[0568] Chothia and Lesk J. Mol. Biol. 196:901-917, 1987
[0569] J. E. Coligan et al., (editors) Current Protocols in Immunology, John Wiley & Sons (including all updates until present)
[0570] Cima, et al., Biotechnol. Bioeng. 38:145 1991
[0571] Clackson et al, Nature, 352:624-628 (1991)
[0572] Cohen et al., Hum. Gene Ther. 10:2701-2707, 1999
[0573] Cole et al., Monoclonal Antibodies and Cancer Therapy, Alan R. Liss, p. 77 (1985)
[0574] Collins et al, Proc. Natl. Acad. Sci. USA 11: 7683, 1984
[0575] Crispin et al., J. Autoimmun., 21: 273-276, 2003
[0576] Cunningham et al., Science, 244:1081-1085 1989
[0577] Cuello, Immunohistochemistry, 1984 John Wiley and Sons, ASIN 0471900524
[0578] Curiel et al., Nat. Med., 10: 942-949, 2004
[0579] Dai et al., J Bioinform Comput Biol 1, 627-645, 2004
[0580] Davies et al., 2007 Biotechnol Bioeng 74:288-294
[0581] De Kleer et al., J. Immunol., 172: 6435-6443, 2004
[0582] Dejaco et al., Immunology, 117: 289-300, 2005
[0583] Dieffenbach and Dveksler (Eds) (In: PCR Primer: A Laboratory Manual, Cold Spring Harbour Laboratories, NY, 1995)
[0584] Devereaux et al, Nucl. Acids Res. 12, 387-395, 1984
[0585] Edelson, The Cancer Journal 4: 62, 1998
[0586] Egholm et al., Am. Chem. Soc., 114: 1895, 1992
[0587] Egholm et al., Nature, 365: 566, 1993
[0588] Emini et al, Nature 304:699, 1983
[0589] Estin et al, J Natl. Cancer Instil 81(6): 445-446, 1989
[0590] Fecheimer et al., Proc. Natl. Acad. Sci. USA, 84: 8463-8467, 1987
[0591] Feizi, Nature 314: 53-57, 1985
[0592] Flotte et al, J. Biol. Chem. 268: 3781-3790, 1993
[0593] Foon et al, Proc. Am. Soc. Clin. Oncol. 13: 294, 1994
[0594] Fraley et al., Proc. Natl. Acad. Sci. USA, 76: 3348-3352, 1979
[0595] Gait (Ed) (In: Oligonucleotide Synthesis: A Practical Approach, IRL Press, Oxford, 1984)
[0596] Gefter et al, Somatic Cell Genet. 3, 231-236, 1977
[0597] Ghetie et al, Blood 83: 1329-1336, 1994
[0598] Gillies et al, J. Immunol. Methods 125:191-202, 1989
[0599] Gilligan et al, Anal Chem, 74(9): 2041-2047, 2002
[0600] Glover and B. D. Hames (editors), DNA Cloning: A Practical Approach, Volumes 1-4, IRL Press (1995 and 1996)
[0601] Goforth et al., Cancer Immunol Immunother. 2008
[0602] Gonzales-Scarano et al, Virology 120: 42, 1982
[0603] Goodman et al., Goodman and Gilman's The Pharmacological Basis of Therapeutics, 8th Ed., Macmillan Publishing Co., 1990
[0604] Gopal, Mol. Cell. Biol., 5: 1188-1190, 1985
[0605] Graham et al., Gen Virol. 36:59, 1977
[0606] Graham and Van Der Eb, Virology, 52: 456-467, 1973
[0607] Gregori et al., J Immunol. 167: 1945-1953, 2001
[0608] Gruber et al, J. Immunol., 152:5368 1994
[0609] Guss et al., EMBO J. 5: 1567-1575, 1986
[0610] Hahn et al, Virology 162: 167-180, 1988
[0611] Ham et al., Meth. Enz. 58:44, 1979
[0612] Ed Harlow and David Lane (editors) Antibodies: A Laboratory Manual, Cold Spring Harbour Laboratory, (1988)
[0613] G. Hartmann and S. Endres, Manual of Antisense Methodology, Kluwer (1999)
[0614] Hellstrom et al, Cancer. Res. 45: 2210-2188, 1985
[0615] Hellstrom et al, Cancer Res. 46: 3917-3923, 1986
[0616] Henttu and Vihko, Biochem. Biophys. Res. Comm. 160(2): 903-910, 1989
[0617] Herlyn et al, J. Clin. Immunol 2: 135, 1982
[0618] Hermonat et al., Proc. Natl. Acad. Sci. USA 81: 6466-6470, 1984
[0619] Hilkens et al, Trends in Bio. Chem. Sci. 17: 359, 1992
[0620] Hochberg and Benjamini Stat Med 9, 811-818, 1990
[0621] Hollinger et al, Proc. Natl. Acad. Sci. USA, 90:6444-6448 1993
[0622] Hoogenboom and Winter J Mol Biol, 227:381, 1991
[0623] Hoon et al., Cancer Res. 53: 5244-5250, 1993
[0624] Irizarry et al., Biostatistics 4, 249-264, 2003
[0625] Itoh et al, Nature 308: 19, 1986
[0626] Jakobovits et al., Nature Biotechnology 25, 1134-1143 2007
[0627] Jespers et al, Bio/technology 12:899-903, 1988
[0628] Jones et al., Nature, 321:522-625, 1989
[0629] Jones et al., Cancer Immun. 22; 2:1, 2002
[0630] Kabat et al., Sequences of Proteins of Immunological Interest, 5th Ed. Public Health Service, National Institutes of Health, Bethesda, Md. (1991)
[0631] Kam et al., PNAS USA 102: 11600-11605 2005
[0632] Kamarch, Methods Enzymol, 151:150-165, 1987
[0633] Kanai et al., Inflamm Bowel Dis., 12: 89-99, 2006
[0634] Kingsley et al, J. Immunol. 168:1080, 2002
[0635] Klein et al., Proc. Natl. Acad. Sci. USA, 100: 8886-8891, 2003
[0636] Koenecke et al., Eur J Immunol. 39):3091-3096, 2009
[0637] Kohler and Milstein, Nature 256, 495-497, 1975
[0638] Kohler and Milstein, Eur. J. Immunol. 6, 511-519, 1976
[0639] Kostelny et al, J. Immunol., 148(5):1547-1553 1992
[0640] Kumar et al, Immuno. Letters 65, 153-159, 1999
[0641] Largaespada et al, Curr. Top. Microbiol. Immunol, 166, 91-96. 1990
[0642] Largaespada et al, Oncogene, 7, 811-819, 1992
[0643] Largaespada et al, J. Immunol. Methods. 197(1-2), 85-95, 1996
[0644] Lee et al., Mol. Immunol. 17, 749-756 1980
[0645] Levine et al., J. Immunol., 159: 5921-5930, 1997
[0646] Lindmark et al., J Immunol Meth. 62: 1-13, 1983
[0647] Liu et al., Scand. J. Immunol., 59: 198-202, 2004
[0648] Livingston et al. J Clin. Oncol. 12: 1036-1044, 1994
[0649] Longhi et al., J. Hepatol., 41: 31-37, 2004
[0650] Lonberg et al., Nature 368 (1994): 856-859;
[0651] Lonberg, N. “Transgenic Approaches to Human Monoclonal Antibodies.” Handbook of Experimental Pharmacology 113 (1994): 49-101
[0652] Lukacs et al., J. Exp. Med., 194: 551-555, 2001
[0653] Macardle and Bailey Cell Biology: A Laboratory Handbook. Chapter 57: Preparation of Monoclonal Antibodies. 2006;
[0654] Marks et al, J. Mol. Biol., 222:581-597 (1991)
[0655] Marks et al, Bio/Technology, 10:779-783 (1992)
[0656] Mather Biol. Reprod. 23:243-251, 1980
[0657] Mather et al., Annals N. Y. Acad. Sci. 383:44-68, 1982
[0658] Mavrangelos et al., J Immunol Methods; 289:169-178, 2004
[0659] McCafferty et al, Nature, 348:552-654 (1990)
[0660] McHugh et al., J. Immunol., 168: 5979-5983, 2002
[0661] Mendoza et al., Biotechniques 27(4): 778-788, 1999
[0662] Messing Methods Enzymol, 101, 20-78, 1983
[0663] Millstein et al, Nature, 305:537-539, 1983
[0664] Miltenyi et al., Cytometry 11:231-238, 1990
[0665] Morrison et al., Proc. Natl. Acad. Sci. USA 81:6851-6855, 1984
[0666] Morrison, Science 229:1202, 1985
[0667] Mottet et al., J. Immunol., 170: 3939-3943, 2003
[0668] Nakamura et al, J. Exp. Med. 194:629-644, 2001
[0669] Narang, et al., Meth. Enzymol 68: 90, 1979
[0670] Narang, editor, “Synthesis and Applications of DNA and RNA,” Academic Press, New York, 1987
[0671] Natali et al, Cancer 59: 55-63, 1987
[0672] Needleman and Wunsch, J. Mol. Biol. 48, 443-453, 1970
[0673] Nelson et al., Electrophoresis 21: 1155-1163, 2000
[0674] Nicolau and Sene, Biochim. Biophys. Acta, 721: 185-190, 1982
[0675] Nielsen et al, J. Chem. Soc. Perkin Trans., 1: 3423, 1997
[0676] Novellino et al., Cancer Immunol Immunother. 54(3):187-207, 2005
[0677] Okazaki et al., JMB, 336: 1239-49, 2004
[0678] Oi et al, BioTechniques 4:214, 1986
[0679] Orum et al., Nucl. Acids Res., 21: 5332, 1993
[0680] Perbal, A Practical Guide to Molecular Cloning, John Wiley and Sons (1984)
[0681] Perez and Walker, J. Immunol. 142: 3662-3667, 1990
[0682] Perikles Bioinformatics 19: 1439-1440, 2003
[0683] Pluckthun, Immunol. Revs., 130:151-188 (1992)
[0684] Presta Carr Op Struct Biol, 2:593-59, 1992
[0685] Putney et al, Science 234: 1392-1395, 1986
[0686] Queen et al., Proc. Nall Acad. Sci. USA 86: 10029 10033, 1989
[0687] Ragnhammar et al, Int. J. Cancer 53: 751-758, 1993
[0688] Reff et al, Blood 83: 435-445, 1994
[0689] Riechmann et al., Nature, 332:323-329, 1988
[0690] Rippe et al., Mol. Cell. Biol., 10: 689-695, 1990
[0691] Rosenfeld et al., Science 252: 431-434, 1991
[0692] Rosenfeld et al., Cell 68: 143-155, 1992
[0693] Rota et al, Virology 188: 135-142, 1982
[0694] Sakaguchi et al., J. Immunol., 155: 1151-1164, 1995
[0695] Sakaguchi et al, Immunol. Rev. 182:18-32, 2001
[0696] Sakaguchi et al., Nature, 426: 454-460
[0697] Saleh et al, J. Immunol., 151, 3390-3398, 1993
[0698] Salomon et al, Immunity 12:431-440, 2000
[0699] Sambrook et al., Molecular Cloning: A Laboratory Manual, Cold Spring Harbour Laboratory Press (1989)
[0700] Santa Lucia, Proc. Natl. Acad. Sci. USA, 95: 1460-1465, 1995
[0701] Scopes (In: Protein purification: principles and practice, Third Edition, Springer Verlag, 1994)
[0702] Sgouros et al, J Nucl. Med. 34: 422-430, 1993
[0703] Shalaby et al, J. Exp. Med., 175: 217-225 1992
[0704] Shitara et al., Cancer Immunol. Immunother. 36: 373-380, 1993
[0705] Shevach, Annu. Rev. Immunol. 18:423-449, 2000
[0706] Shevach, Nature Rev. Immunol 2:389, 2002
[0707] Shield et al, 2002, J Biol Chem 277:26733-26740
[0708] Shinkawa et al., 2003, J Biol Chem 278:3466-3473
[0709] Shopes, B. J. Immunol. 148:2918-2922 1992
[0710] Singh and Wengel, Chem. Commun. 1247, 1998
[0711] Skerra et al, Curr. Opinion in Immunol., 5:256-262 (1993)
[0712] Smyth et al., Bioinformatics (Oxford, England) 21, 2067-2075, 2005
[0713] Spandidos et al., BMC Genomics, 9:633, 2008
[0714] Suresh et al, Methods in Enzymology, 121:210, 1986
[0715] Suri-Payer et al, J. Immunol. 157:1799-1805, 1996
[0716] Suri-Payer et al., J. Immunol., 160: 1212-1218, 1998
[0717] Stephens et al, Eur. J. Immunol. 31:1247-1254, 2001
[0718] Stevenson et al., Anti-Cancer Drug Design 3:219-230 1989
[0719] Taams et al, Eur. J. Immunol. 31:1122-1131, 2001
[0720] Tailor et al, Nucl. Acids Res. 18(16): 4928, 1990
[0721] Tang et al., J. Exp. Med., 199: 1455-1465, 2004
[0722] Thompson et al, Nucl. Acids Res. 22, 4673-4680, 1994
[0723] Tomizuka et al., Proceedings of the National Academy of Sciences USA 97(2) (2000): 722-727
[0724] Tratschin et al., Mol. Cell. Biol. 5: 3251-3260, 1985
[0725] Tratschin et al., J. Virol. 51: 611-619, 1984
[0726] Traunecker et al, EMBO J., 10:3655-3659 1991
[0727] Trenado et al., J. Clin. Invest., 112: 1688-1696, 2002
[0728] Tur-Kaspa et al., Mol. Cell. Biol., 6: 716-718, 1986
[0729] Tutt et al, J. Immunol. 147: 60 (1991)
[0730] Umana et al, Nat. Biotechnol 17:176-180, 1999
[0731] Urlaub et al., Proc. Natl. Acad. Sci. USA 77:4216, 1980
[0732] Vacanti, et al., J. Ped. Surg. 23:3-9 1988
[0733] Vacanti, et al., Plast. Reconstr. Surg. 88:753-9 1991
[0734] Van der Sluis et al., Gastroenterology 131: 117-129, 2006
[0735] Van Maurik J. Immunol. 169: 5401-5404, 2002
[0736] Venken et al., J. Immunol. Methods, 322: 1-11, 2007
[0737] Verhoeyen et al., Science, 239:1534-1536, 1988
[0738] Vijayasardahl et al, J Exp. Med. 171(4): 1375-1380, 1990
[0739] Wang and Seed Nucleic Acids Res 31, e154, (2003)
[0740] Wang et al., Immunity 20: 107-118, 2004
[0741] Wang et al., J Clin Invest. 118(7): 2629-2639, 2008
[0742] Waterhouse et al, Nuc. Acids. Res., 21:2265-2266 (1993)
[0743] Weissinger et al., Proc. Natl. Acad. Sci. USA, 88, 8735-8739, 1991
[0744] Weissinger et al, J. Immunol. Methods 168, 123-130, 1994
[0745] Wettenhall and Smyth Bioinformatics (Oxford, England) 20, 3705-3706, 2004
[0746] Willerford et al, Immunity 3:521-530, 1995
[0747] Wing and Sakaguchi, Nature Immunology, 11: 7-13, 2010;
[0748] Wolff et al., Cancer Research 53:2560-2565 1993
[0749] Wondisford et al., Mol. Endocrinol. 2: 32-39, 1988
[0750] Wu and Wu, J. Biol. Chem., 262: 4429-4432, 1987
[0751] Yang et al., Proc. Natl. Acad. Sci. USA, 87: 9568-9572, 1990
[0752] Yaniv Nature 297: 17-18, 1982
[0753] Yokata et al, Cancer Res. 52: 3402-3408, 1982
[0754] Yu et al, Cancer Res. 51(2): 468-475, 1991
[0755] Zola (Ed), “Monoclonal Antibodies: A Manual of Techniques”, CRC Press, 1987.

1. A method for detecting a regulatory T (Treg) cell comprising determining the level of expression of a nucleic acid or protein set forth in Table 2 and/or Table 3, or a nucleic acid or protein having at least about 70% identity thereto, in/on a T cell, wherein an increased level of expression of a nucleic acid or protein set forth in Table 2 or a nucleic acid or protein having at least about 70% identity thereto compared to another cell type, or a reduced level of expression of a nucleic acid or protein set forth in Table 3 or a nucleic acid or protein having at least about 70% identity thereto compared to another cell type is indicative of a Treg cell.

2.-3. (canceled)

4. The method according to claim 1, wherein the protein is selected from the group consisting of or the nucleic acid encodes a protein selected from the group consisting of PI16, WDFY4, AQP3, PTPRB, PLXNB2, PKD1L3, LSR, RGMB, EPHB1, TMEM169 and NPAL2.

5. The method according to claim 1, wherein the protein is PI16 or the nucleic acid encodes PI16.

6. The method according to claim 1, wherein the Treg cell is an activated Treg cell and the nucleic acid or protein is set forth in Table 5 and/or Table 6.

7. (canceled)

8. The method according to claim 1, wherein the level of expression of a protein set forth in Table 2 and/or Table 3 and/or Table 4 or Table 5 or a protein having at least about 70% identity thereto in/on the T cell is determined by contacting the cell with a compound that binds to said protein for a time and under conditions sufficient for a compound-protein complex to form and detecting the level of said complex.

9.-10. (canceled)

11. The method of claim 1 additionally comprising isolating the identified cells.

12. A method for isolating a population of cells enriched for regulatory T (Treg) cells, said method comprising:
(i) contacting a population of cells comprising Treg cells with a compound that binds to a protein set forth in Table 2 and/or 4 or a protein having at least about 70% identity thereto for a time and under conditions sufficient for said compound to bind to a cell and isolating cells to which the compound is bound; and/or
(ii) contacting said population with a compound that binds to a protein set forth in Table 3 or a protein having at least about 70% identity thereto for a time and under conditions sufficient for said compound to bind to a cell and isolating cells to which the compound binds to a reduced level compared to other cells in the population, and
isolating the identified cells,

13.-21. (canceled)

22. An isolated population of cells enriched for regulatory T (Treg) cells expressing one or more of the nucleic acids or proteins set forth in Table 2 and/or 4 and/or expressing a reduced level of one or more of the nucleic acids or proteins set forth in Table 3.

23.-27. (canceled)

28. The isolated population of cells enriched for Treg cells of claim 22 expressing CD4, CD25 and PI16, and optionally expressing low or undetectable levels of CD127.

29.-33. (canceled)

34. A method for diagnosing and/or prognosing a regulatory T (Treg) cell-associated condition in a subject, said method comprising:
(i) detecting the level of a nucleic acid or protein set forth in Table 2 or a nucleic acid or protein having at least about 70% identity thereto in a sample from a subject;
(ii) comparing the level at (i) to the level of the nucleic acid or protein in a normal and/or healthy subject,
wherein an increased or reduced level of the nucleic acid or protein at (i) compared to the level in the normal and/or healthy subject indicates that the subject suffers from a Treg-associated condition.

35.-37. (canceled)

38. A method of treating or preventing a condition associated with reduced regulatory T (Treg) cell numbers or activity, and/or inducing immunosuppression, and/or reducing CTL or Thelper cell activity in a subject, said method comprising administering the isolated population of cells according to claim 22 or:
(i) isolating a population enriched for Treg cells by performing the method according to claim 12; and
(ii) administering the cells at (i) to the subject.

39. (canceled)

40. A method of treating or preventing a condition associated with regulatory T (Treg) cell-mediated suppression of a subject's immune system or for modulating an immune response, said method comprising administering to a subject in need thereof a compound that reduces expression and/or activity of a protein or nucleic acid set forth in Table 2 and/or administering to a subject in need thereof a compound that increases expression and/or activity of a protein or nucleic acid set forth in Table 3 and/or administering a compound that binds to a protein set forth in Table 2 and/or Table 4 and reduces Treg cell activity and/or induces Treg cell death.

41.-55. (canceled)

The application's sequence listing, which the Patent Office published only in electronic form, follows.

SEQUENCE LISTING (286 sequences)

SEQ ID NO: 1 - DNA, 5269 bp, Homo sapiens
  CDS (423)..(2390)
gctgagtctgagggaggctccggacccgagagccgcgagagccgccgccgctgcggccgccgccagatctgcggccgggagcccgggctgtgaggagccgggaggagcggggtgcgctgccgggcgctgaccgccctcccgcccgccgtcagaggtctgcggtgacagctcttcttcagagagaaggacaacaaggtcccagtggcccctcctcagggtctgcagtaggcctccgcatggcccaccgaggtgaaccatgaccggctggccaacattcgccattgaccagccggagttgcatctcgccaggaggtgacccctcctccagctgcccccaactcgcccaccctcgcccaggaaagtgcccgcagctgccacggacaccatgtagtagggccggctgcggcgcccagtgagctgcgatggttttgtacacgaccccctttcctaacagctgtctgtccgccctgcactgtgtgtcctgggcccttatctttccatgctactggctggtggaccggctcgctgcctccttcatacccaccacctacgagaagcgccagcgggcagacgacccgtgctgcctgcagctgctctgcactgccctcttcacgcccatctacctggccctcctggtggcctcgctgccctttgcgtttctcggctttctcttctggtccccactgcagtcggcccgccggccctacatctattcacggctggaagacaagggcctggccggtggggcagccctgctcagtgaatggaagggcacggggcctggcaaaagcttctgctttgccactgccaacgtctgcctcctgcccgactcactcgccagggtcaacaacctttttaacacccaagcgcgggccaaggagatcgggcagagaatccgcaatggggccgcccggccccagatcaaaatttacatcgactcccccaccaatacctccatcagcgccgctagcttcagcagcctggtgtcaccacagggcggcgatggggtggcccgggccgtccccgggagcattaagaggacagcctctgtggagtacaagggtgacggtgggcggcaccccggtgacgaggctgccaacggcccagcctctggggaccctgtcgacagcagcagcccggaggatgcctgcatcgtgcgcatcggtggcgaggagggcggccggccacctgaagctgacgaccctgtgcctgggggccaggccaggaacggagctggcgggggcccaaggggccagacgcccaaccataatcagcaggacggggattcagggagcctgggcagcccctcggcctcccgggagtccctggtgaaggggcgagctgggccagacaccagtgccagcggggagccaggtgccaacagcaagctcctgtacaaggcctcggtggtgaagaaggcggctgcacgcaggaggcggcaccccgacgaggccttcgaccatgaggtctccgccttcttccccgccaacctggacttcctgtgcctgcaggaggtgtttgacaagcgagcagccaccaaattgaaagagcagctgcacggctacttcgagtacatcctgtacgacgtcggggtctacggctgccagggctgctgcagcttcaagtgtctcaacagcggcctcctctttgccagccgctaccccatcatggacgtggcctatcactgttaccccaacaagtgtaacgacgatgccctggcctctaagggagctctgtttctcaaggtgcaggtgggaagcacacctcaggaccaaagaatcgtcgggtacatcgcctgcacacacctgcatgccccgcaagaggacagcgccatccggtgtgggcagctggacctgcttcaggactggctggctgatttccgaaaatctacctcctcgtccagcgcagccaaccccgaggagctggtggcatttgacgtcgtctgtggagatttcaactttgataactgctcctctgacgacaagctggagcagcaacactccctgttcacccactacagggacccctgccgcctggggcctggtgaggagaagccgtgggccatcggtactctgctggacacgaacggcctgtacgatgaggatgtgtgcacccccgacaacctgcagaaggtcctggagagtgaggagggccgcagggagtacctggcgtttcccaccagcaagagctcgggccagaaggggcggaaggagctgctgaagggcaacggccggcgcatcgactacatgctgcatgcagaggaggggctgtgcccagactggaaggccgaggtggaagaattcagttttatcacccagctgtccggcctgacggaccacctgccagtagccatgcgactgatggtgtcttcgggggaggaggaggcatagaccgtccggagcagcggggcctctgccagcccttgcagctgcagcccatccctgggccatgtcccctccatcgagtgcccggtgcttgggggaggagggcagggacagggagggagccacagtcagtgcccgggaacctggaagctgcgctgctctgcgcctctgggcctcactgtggacagaggagtcaggcccgccccaggagcctccagctgcctaaccagtgccattctttcacaacacgattttctacaaatctacagcacaaccgagtttgtaacccgtgggttagtatgaggaccgggttcgtgtactctctgtatctcctcttaagcttcgtccagggttctttatttttgtctgctgccaatgtcgtctcgcatgcctgcaccctcgcatgcacgctgcccgcatgccacgtgccacgctgtagccacagaccccttgctcgggcctcacccaaggccaaactccaaacacaatcagaaccagccaaagaagcacttcctgggcacggccaccagctctcccgcctccagtgtgggccggctcctgcagggtccgagggctgcatctctaccagccagcccagggctcttcccagggtctcgcattcaagggcaattacattttaaaaagaaaaacagaaaaaggttaatcacaaaaccaaccctcacttcacagggtctgtaagtcactcatagaactttgctcttcccgagacagggtcccttccccagctcaggcacaacagagtctggcaggctctggcaccctgggcctcctccgggagcctcccatctgggcagtggagccataaacggggatccgagaagagagtatccacttttttttttacaggaagaagggactcacagcataaacgggggtgggggggatcctgattttgaaaataatctatttgtagcttctcttctatcaaaaccaacacatcctcttctttctgccaatcctctcccccacgggacacctctctggttcgggaccaatccctccctggggacgtgccccacctgcgtgccggctgagctcaggaacccctgcctgccccccgggtggggctgcggctctggcctcccaggcccatcctcaacagctaccccagccaacaccaaggccacaaggggaccccggcctaggaggcaggaagccaaggtgcagagagcagcctggccctcaccagtgcgcaagctggggcagcaaggctgacagttgctgcatgcccagggcagggtgtggtactggcacccaagttcagcatggcagagctggccaacagcttgtggtccccgatctgcctccagccccaagatgcctacagcccccaggccccttcggcagcactgcctctgcccacctgcctttaagagactccagggctgctcctgtcatgcagcgaaggttttgtctgtttcaaagttcgagactcaacttgagggactgtttttgacaatccccgctgacctccgctcctcgtggcgccctggccctacacccagcctggcccagggccggctttgcctggtgaggctggagggagcaccaggacctgctgtctgctgtcagcccctcctggtgctggtgccctgatgctgtgccttgtcacccattgagctgcaagagggaccaagagggggccacgcagccagccagatgcctggccctgtgctggggcagacaacgctgcagagcccagggagcctggcgctaggacgtgcgtccttgtgacactggcctgtctgaactcacctggcctgggaagcaccgtctgcccgggcccaagccctgcccctccagagtccagagccaggaaggggctgctgagggcgagcatcctgctgggctctctgcccggcccacccctccaaggggctggcctgtgagccttgactgggattcatgatgtggaggcccccaacttccagaagcagctggtactctgctcacacaagcgactgggccggccggccctggacccctagaccccgagccgcctgccgactgcctgcacagggagagcagttgaggcccgggcagggcccccacaccagaccccaacatagcttccccacccaggcaccccctcccggggcagcaggcgtgggagtcagggctgcatgctcctcccctcccacctcacaggcggccttaggcaagtcattttctgtcatcacaaggtcgcctctgcctagtcaggtcctggggtccagagtaaggatgtgcggcccccaggcccccgcacacctccctcagcaccaagaccgggacccccccacccacgtgtctcattgtggctgcctatggactcccgggccttgtgtgcaggccaggcccttccactgattttttaaagtgaaccattgctggatctcagattctgtggcatctaaggcctagcaggggtgggcacacgggtcacccgaggcccataccaagactctgttcctgccctaggcccagtctcaaaggaagccacaaggcgcgggggccactgaggaaggaaatgttcattttcatttgtccaaaaccaccttaagttttaagtatattaatcttgatgctttttaactattgctttttaacttgctgagatttagaaatactgttataaaaacttttttaatttctgtatttttttctgtattgtatcttcatgggacattaggggttttctatggtaagcacacctatggttttggtaaaaacattatcaaatatatatccagacggttcttccctagaagaaaaacaagtctttacacctgataaaatattttgcgaagagaggtgttctttttccttactggtgctgaaaggaaggatggataacgaggagaaaataaaactgtgaggctcaa

SEQ ID NO: 2 - protein, 655 aa, Homo sapiens
MVLYTTPFPNSCLSALHCVSWALIFPCYWLVDRLAASFIPTTYEKRQRADDPCCLQLLCTALFTPIYLALLVASLPFAFLGFLFWSPLQSARRPYIYSRLEDKGLAGGAALLSEWKGTGPGKSFCFATANVCLLPDSLARVNNLFNTQARAKEIGQRIRNGAARPQIKIYIDSPTNTSISAASFSSLVSPQGGDGVARAVPGSIKRTASVEYKGDGGRHPGDEAANGPASGDPVDSSSPEDACIVRIGGEEGGRPPEADDPVPGGQARNGAGGGPRGQTPNHNQQDGDSGSLGSPSASRESLVKGRAGPDTSASGEPGANSKLLYKASVVKKAAARRRRHPDEAFDHEVSAFFPANLDFLCLQEVFDKRAATKLKEQLHGYFEYILYDVGVYGCQGCCSFKCLNSGLLFASRYPIMDVAYHCYPNKCNDDALASKGALFLKVQVGSTPQDQRIVGYIACTHLHAPQEDSAIRCGQLDLLQDWLADFRKSTSSSSAANPEELVAFDVVCGDFNFDNCSSDDKLEQQHSLFTHYRDPCRLGPGEEKPWAIGTLLDTNGLYDEDVCTPDNLQKVLESEEGRREYLAFPTSKSSGQKGRKELLKGNGRRIDYMLHAEEGLCPDWKAEVEEFSFITQLSGLTDHLPVAMRLMVSSGEEEA

SEQ ID NO: 3 - DNA, 8686 bp, Homo sapiens
  CDS (669)..(1589)
gctgggtctccgagccccggaggaagcaggcgtgtgttgaatttctctctgcccctcaccttggaataaacaggaagcgacaagcacccagcccggcccggcacttgcctttgtgaaggggtctgccctgcacagcctttaggaagcttcctcgggaccccttcccggtgcgccgccccgggtgggcctgggggcgcgccctcggttcaagctctacgttcgtgacatcaaacctcctgttgggccatttccgagaactcccatcagtttctgtatagtgtaaaagtttcagaggcggagcacagagagctgcggctgggacaaggagcacccgcgtgcaggtgcgaccctgcaggatgctggcagcggcgtggccaggggcgcccgtgttctgagggcctgagggccagcccctccacccgcgccatggcctccgcgccctggctggacggctgacgggagcagggaccgccgccgcccaggtgccacacccaggtaccgcccgcccgcgcgagagccgggcaggtgggccgcggatgctcccagaggccggcccagcagagcgatggacttggacaggctaagatggaagtgacctgagcctcgcccggcggcttcctcgacgggacagcgcaagagttggagcacaggcttgtccggggagcagtatgccggaagctggttttcaggccacaaatgctttcacagagtgcaaattcacctgcaccagtggtaaatgcttgtatcttggttcgctggtctgtaaccaacagaacgactgtggggacaacagtgacgaagagaactgtctcctggtgaccgagcacccgcctccgggcatcttcaactcggagctggagttcgcccaaatcatcatcatcgtcgtggtggtcacggtgatggtggtggtcatcgtctgcctgctgaaccactacaaagtctccacgcggtccttcatcaaccgcccgaaccagagccggaggcgggaggacgggctgccgcaggaagggtgcctgtggccttcagacagcgccgcaccgcggctgggcgcctcggagatcatgcatgccccgcggtccagggacaggttcacagcgccgtccttcatccagagggatcgcttcagccgcttccagcccacctacccctatgtgcagcacgagattgatcttcctcccaccatctccctgtccgacggtgaagagccacctccttaccaggggccctgcaccctgcagctccgggaccctgaacagcagatggaactcaaccgagagtccgtgagggccccacccaaccgaaccatatttgacagtgatttaatagacattgctatgtatagcgggggtccatgcccacccagcagcaactcgggcatcagtgcaagcacctgcagcagtaacgggaggatggaggggccaccccccacatacagcgaggtgatgggccaccacccaggcgcctctttcctccatcaccagcgcagcaacgcacacaggggcagcagactgcagtttcagcagaacaatgcagagagcacaatagtacccatcaaaggcaaagataggaagcctgggaacctggtctgattccttccaacgtgcacttcagctggagaaagaaaccaagaagggaagcggccgctgggcccctcctgcgcacagtgttgttcagtttcacatggtacaaataagtaaaaccaaatgagcaaacacggtctttgtttctgattccttttaggggaattgcatgcaaactagactgaaatgatacaaacttccatctggtctgaccgcaaacagtgtttatttggggacaggggttgggatgggggtgtgggcaggggaaaacagagaacgggatgctttgaagataccatgaaataaaacccacagaggtatttgatgtatttaattgtgaaaggagactttgcagataaatgaggccagaatggcatgttttataattaactgaataaagaaggaagcattattatatattattgtggggaagaaccagccagttcgctttttctcctaaggtgtggaacttttattttgttttaaaaatatgaatcaaaattcctgtgttgtgtgccaaggtataaagtggagaagttagatgagtgcaaggagctcctttgtgttgtgatgatgtgttttaaaagttgcactatcttaatgttgaaaatatttacaagggaactgttttacgtgaagttctgtatgttgtcttttcacctgtggattgtaatcaggcccaaggaatatcctggagtggtccccagaagcatccaagaaaagatatttggggacgtagcctaacattttaccaacttacgtaaatcaaaaaagtcattattgttgcaggagtttgcatcaaatagcagtgcatcgctgaagcttttggagacttttggatggaagataagatagggaagattaagttccagcatttctgacttgttattttgagttactctgctactcttaggctgcatagtttatgagaaaatgaacacatgcatttatggatccagtatcatgcagtgctgccctcatcctccagcagtgcaatttcttcagtaatttagatttttttcactatagcatgaaatatattcaaatacataccttattttatgcaataaattgtttaaaatgcaaggtggttattctgcatactgttgaaatatgtgactcctcagtatattcccattgcctctccccctttcctcgacagcttagttcagttctgcagggctgctcagttcacaggaggctcccagcagccaccccacatccagcctacacagaacttcgtgtgggagtggtgtgggtggtggtttcttatgctttggaagcccctagaaataatgacggaagaatgccatgttgctgatcgtggtaataagccattgtgggttattgtatgtcactagtattagcatagcattcttaaaggaatgcagtgctcaaaacctacccaaattcccgcaggattctaccaaacccttccccaggccagcttttgtactgaaggcaagaactggacagtcagagaacagtggagggggcaagtgactgaagagcaccgggtaaaaagcacaacatgcagttaaaatgcaactagaaaactaattttaaatattgttagttttaatattcctgatatttacaaatattcattcttatatacaatgaaaaaaataactttcttctgcagatgtaagcactggcttttataagagcagcagccaacacgtttagcagacactgcgcgtggagaagggcttatctgcagtacactctgccatgtggagggtgggcctctgtggcctcttcacataacaagatgagctggaatgatgattccatgactcccacctatgcagccttaaagccaaatccgcgtgtgtgtgtttgtgtctgtctgtgggtctcgaaggtgatccgtcggtgcggtggctctgtgctgtaactggagagactgttccaaaccccaagagttgtctgatcctagtctgttcccttctgcttcttacctctgtagataggtcactggtttttgtttgtttgttttgaggattggaatttccattacattcatcctttgcacacagtaacatccacagaactagtccaactcttaaaaggagagaggaaaaacacaggcaccagttgtcagctcatgcttacaacctgtgtggaagtatatacagttgagagtcacagtggaggttctgagactggattcagtcttgttccagtgacagttggaaggcctctgctggagagacaccagctctcagggcagagattggcttggggccagaaggaccctccccaaccctggagacaccctgaaggttcactggctctccagattagcctctcttcctctgtcaggcaaagatgaggagcccgtgttcccatcgggccctgctggcagggacttgcagtggattcttggtcaggtgtgcccacagatgcggaggcgaggtgagtgattccatcatttcagttctcacctgcagttttggtgaagcaggagatgcaccccacagctctagctctcaaatggcttcacagtccttacttctctacctgcctcaagaaggggctcagagcagagacttgtgaattccttagtaactgtgagtatatgaatgtgttgcacatgtccacagtattggcgagataattacataattcagatacctttaatcatctttcaagaaagaggctcctcccattcaaccaccctagagaactgcctttgttaaatagttatttaaagactcatacatatcaaaccatgactttgaaaggtcttcgaggctggggctctgtaatgaattagtttaaaagccaaggtcataacatgaattgatggtcaatttcccttcagcagaaggaaaaggtgatttagatcagtagctcttttgaaggttgtggctgacctgttcataccgtgtcgcctcatggctagtgtggcgttgaaagagtagcgactgggaagatacaacttacacagtggggcctattgttctttcaagaaccctttttttagcttatagaacccatgggtccagtttagtaacgagtgatttaggcaatcaatgataggtttataatcttagattattccagcaaagtgtggattgcattgttaggaagaacatttggtgggaatgaacactcctgggcataccgctgacttttgtcccttgttcccggtgtaggagacccaaggcatcttgaatcccatctataagaacacaatcttccagcatacgtttgctttttcagaaactctagcattctctttaaatactgacgcaatccttaatggaaaagagatttcatgaagcaaattatgtatttcaatagttcttctatttttagtgtccaaaatttactaatacagaagcttgacaagcatgtcctcaccctccccaccacataaacacatggacacacacccaagccacaagaaatcccaagagagcagaagcgaatttttaaaagatttatcgtgaggactgcatttccattcactaattttggctcaaacttatgaggcaggaaataggggccaacagtaaatgggggaggcctcctgacaccagcagaggaattttgtacccaggcgaggacttcttgaacttctgcgtatctccgtttgatctctttcacctttatttcatcttcataagaatgagaaaggctcaaaaggaagcacttttagaaatcttctctgacctagaagaatccatccaaatccctgccttcctctctgaaccaacagttcccttctctgacaggggccatcctctatcttccatccagcggctcttctttttaggaaggctctggtgcagagcacttcaaatatgtcctcaggccagatactgattgctagtagagagacacccggcacccagtccgaagccctccctcaaaggaccggctcatggcgttggtcactggcaggctcagagacattctgctgtgggcgcagggagcccggccccccatgcagccatgactggatgcgcccccatctcgggggcttgctgcactgcttgtttattgaattttgctacttagaatggcaacattaactttgtgtaccattcattttttaaaaattttccaaagctcggcagtgtatgaaagaaaaaactgggaaagatacttggtttctgttaacttttgtgttgcttgcttaagtgattaaagccagtgcttggagccaagccttcatgccacgaacatgctccacagcctgccctttgctctcctgctcacactgaccaagaatgccgcgtgcttggcctactgaggtgaaaggacaattgaatgacaggtgggcaaagggagaacttccccttcttggtgcgaggaaagtcacaaatttaaaaatgttgcttccagcccagatcctaaatgctagttctcagcagctgcgtggcttaccgttcgccatttccaccaccgccagctgccagcaccgctacagatcacagagatgtgaacagacaatggaaagcactcttagccttgcagtggtctacattttttaggaaccaatatttcagcattctttattacccggcacgctgtgtcctttgcagagttcaagtttatgttactgccagggtcagacagtcatttgctgctgctgctgctgctgctgcttctcgaactggatgcattaggaagctgctgtctgagtgtaggaatgtcttgctaagaaagcaatgtcttccttcatccttttctttcttccctctgcgtgtccttgtttttgtgtaatgcgggagagggttagagctatagagattatatatacactatccgtgcacattatatatatgtagatatacccctatcatgtcagagatctgcatgtcagtttttcagcaactaaggtgcctcatgttctgagttcagcagatataggaaccaagccgccccctcctgcacttgatgctcccacctttgttgtgcctcacttaaaatggtgcttttttcagttgtctgtcttttcttatgtttttatttgtaaggtgctgtatataagttgaatatattatgcacatatcctacccaatgggtagaacaaaaagttgttaatactgtaatataatgtatagatgataccaattttaacagaaatggcatagaatttgtgaatgcctatgtgctttgtcctcttttgtaaggaaatttgcaaatggatgcatacagattaaagtctatgtagtttattttcctattaaatatcaatattataacacaagagaaagaagtgtgaacaaacaagcaacagtttatgaccagcgtatatatagcaatggaaagttgcatctttgctgtgaaaacactttaaagaaaatactttttaaaaaatcccacagctttttggttgccactagacgcttcttattttaatcattttagtaatgctcagctggaccagtgttagttatatttgagtcagaaaaatgttgtttttcaacttgctttataatctcctgcatctatctcctgctgtagcatcacgaaggtgtcaggcaacagtgaaaagtgcacatttttgttgttgcagaaactgtgtcagaggaataagtaaatcagcctgcagcagaagactttgttcagctccagaggcatctgtgaccgtctgtgtccaagtctctctgtgcctttttcttttacaaactgaagctgtggagccaatgaagtaacagtagagattgtagggaaagaatacctcaggaaaaacaaatacacttacaagaagaccctgttcttagaaaatgtgtttagttatgggttagcactagaagagacttggctgtcagccagccaagtgaaggacctctcatccattcccattcatgtcccatcataatacggacccaaaaagcaaactcggttttgccatcagttagaaattacgttttggattgtatattgttacatctctcttccggcttagtttttagtgtctgattgtgacctctgcatttatcttcaaataccctaattttaaaacaaaagaacaagaaaagtttataacaccatgttcactaaaaccacggttgaatcttgggtgtgggcatcctttcgagtgttgtccataagagcagttcgtggaattttgcccatctgacccatattatcagcttattctgccaccagagtagagtctaataaattccaaagtttttatttgctccatggtgtatgttctgactttgaaaatgtcagattctataatcatacccctaacatccaggaaacaaatgacagattatctttaaactgaaattgactctacaatgcaacccttaatgctgaatggattaaaaaagtcagcccttttagtatctgtttgaaagggccgtaaaaagttgacacttttgttgttgtggatcctgcgtgtctagacccacgtgttgtttccatcgtatactgtagggtgcaccccttgggattcatcattaagaactgaggctcactgttgtcagaaacaaagctcccaccccccaggttcaaccttgtgggagaactgttgagcatgagaatgttctagactcagaggtactaaaatttgttaccacatcattgcttcctttctacaggacgaattgaggcttaaactttactgttaatgatactggttcattttaatgtgcttgttggtatgttgctatttttcatttcatagctttcaaaaatcatgctaattgtatacttgtctagtttaaggctattttaaaatatgtacaatactattcacagcatttagttcgtttaatttttattataaagcaatctactaaaaaagtacaactgtatttgaacttttcaatagttgtttgtgagctatgataatcaaaagtcattaaagtcttttttaacaaacattcgtgcttacttttcaacataattcccagttatatacagaaaaagatttccacctgtcacgtatctgcctcttttacctgagcaatggtgtagttcttagacctaaggtctgtaattgcaatacttttaaagaaagatgttgctctaagtgctgtttgttagttatgaaatcagatttttctgcttgttcttaatgctgtggtcaaaccatagcacaaaatcattaaaaataatcagcggcatac

SEQ ID NO: 4 - protein, 306 aa, Homo sapiens
MPEAGFQATNAFTECKFTCTSGKCLYLGSLVCNQQNDCGDNSDEENCLLVTEHPPPGIFNSELEFAQIIIIVVVVTVMVVVIVCLLNHYKVSTRSFINRPNQSRRREDGLPQEGCLWPSDSAAPRLGASEIMHAPRSRDRFTAPSFIQRDRFSRFQPTYPYVQHEIDLPPTISLSDGEEPPPYQGPCTLQLRDPEQQMELNRESVRAPPNRTIFDSDLIDIAMYSGGPCPPSSNSGISASTCSSNGRMEGPPPTYSEVMGHHPGASFLHHQRSNAHRGSRLQFQQNNAESTIVPIKGKDRKPGNLV

SEQ ID NO: 5 - DNA, 8632 bp, Homo sapiens
  CDS (669)..(1535)
gctgggtctccgagccccggaggaagcaggcgtgtgttgaatttctctctgcccctcaccttggaataaacaggaagcgacaagcacccagcccggcccggcacttgcctttgtgaaggggtctgccctgcacagcctttaggaagcttcctcgggaccccttcccggtgcgccgccccgggtgggcctgggggcgcgccctcggttcaagctctacgttcgtgacatcaaacctcctgttgggccatttccgagaactcccatcagtttctgtatagtgtaaaagtttcagaggcggagcacagagagctgcggctgggacaaggagcacccgcgtgcaggtgcgaccctgcaggatgctggcagcggcgtggccaggggcgcccgtgttctgagggcctgagggccagcccctccacccgcgccatggcctccgcgccctggctggacggctgacgggagcagggaccgccgccgcccaggtgccacacccaggtaccgcccgcccgcgcgagagccgggcaggtgggccgcggatgctcccagaggccggcccagcagagcgatggacttggacaggctaagatggaagtgacctgagcctcgcccggcggcttcctcgacgggacagcgcaagagttggagcacaggcttgtccggggagcagtatgccggaagctggttttcaggccacaaatgctttcacagagtgcaaattcacctgcaccagtggtaaatgcttgtatcttggttcgctggtctgtaaccaacagaacgactgtggggacaacagtgacgaagagaactgtctcctggtgaccgagcacccgcctccgggcatcttcaactcggagctggagttcgcccaaatcatcatcatcgtcgtggtggtcacggtgatggtggtggtcatcgtctgcctgctgaaccactacaaagtctccacgcggtccttcatcaaccgcccgaaccagagccggaggcgggaggacgggctgccgcagatcatgcatgccccgcggtccagggacaggttcacagcgccgtccttcatccagagggatcgcttcagccgcttccagcccacctacccctatgtgcagcacgagattgatcttcctcccaccatctccctgtccgacggtgaagagccacctccttaccaggggccctgcaccctgcagctccgggaccctgaacagcagatggaactcaaccgagagtccgtgagggccccacccaaccgaaccatatttgacagtgatttaatagacattgctatgtatagcgggggtccatgcccacccagcagcaactcgggcatcagtgcaagcacctgcagcagtaacgggaggatggaggggccaccccccacatacagcgaggtgatgggccaccacccaggcgcctctttcctccatcaccagcgcagcaacgcacacaggggcagcagactgcagtttcagcagaacaatgcagagagcacaatagtacccatcaaaggcaaagataggaagcctgggaacctggtctgattccttccaacgtgcacttcagctggagaaagaaaccaagaagggaagcggccgctgggcccctcctgcgcacagtgttgttcagtttcacatggtacaaataagtaaaaccaaatgagcaaacacggtctttgtttctgattccttttaggggaattgcatgcaaactagactgaaatgatacaaacttccatctggtctgaccgcaaacagtgtttatttggggacaggggttgggatgggggtgtgggcaggggaaaacagagaacgggatgctttgaagataccatgaaataaaacccacagaggtatttgatgtatttaattgtgaaaggagactttgcagataaatgaggccagaatggcatgttttataattaactgaataaagaaggaagcattattatatattattgtggggaagaaccagccagttcgctttttctcctaaggtgtggaacttttattttgttttaaaaatatgaatcaaaattcctgtgttgtgtgccaaggtataaagtggagaagttagatgagtgcaaggagctcctttgtgttgtgatgatgtgttttaaaagttgcactatcttaatgttgaaaatatttacaagggaactgttttacgtgaagttctgtatgttgtcttttcacctgtggattgtaatcaggcccaaggaatatcctggagtggtccccagaagcatccaagaaaagatatttggggacgtagcctaacattttaccaacttacgtaaatcaaaaaagtcattattgttgcaggagtttgcatcaaatagcagtgcatcgctgaagcttttggagacttttggatggaagataagatagggaagattaagttccagcatttctgacttgttattttgagttactctgctactcttaggctgcatagtttatgagaaaatgaacacatgcatttatggatccagtatcatgcagtgctgccctcatcctccagcagtgcaatttcttcagtaatttagatttttttcactatagcatgaaatatattcaaatacataccttattttatgcaataaattgtttaaaatgcaaggtggttattctgcatactgttgaaatatgtgactcctcagtatattcccattgcctctccccctttcctcgacagcttagttcagttctgcagggctgctcagttcacaggaggctcccagcagccaccccacatccagcctacacagaacttcgtgtgggagtggtgtgggtggtggtttcttatgctttggaagcccctagaaataatgacggaagaatgccatgttgctgatcgtggtaataagccattgtgggttattgtatgtcactagtattagcatagcattcttaaaggaatgcagtgctcaaaacctacccaaattcccgcaggattctaccaaacccttccccaggccagcttttgtactgaaggcaagaactggacagtcagagaacagtggagggggcaagtgactgaagagcaccgggtaaaaagcacaacatgcagttaaaatgcaactagaaaactaattttaaatattgttagttttaatattcctgatatttacaaatattcattcttatatacaatgaaaaaaataactttcttctgcagatgtaagcactggcttttataagagcagcagccaacacgtttagcagacactgcgcgtggagaagggcttatctgcagtacactctgccatgtggagggtgggcctctgtggcctcttcacataacaagatgagctggaatgatgattccatgactcccacctatgcagccttaaagccaaatccgcgtgtgtgtgtttgtgtctgtctgtgggtctcgaaggtgatccgtcggtgcggtggctctgtgctgtaactggagagactgttccaaaccccaagagttgtctgatcctagtctgttcccttctgcttcttacctctgtagataggtcactggtttttgtttgtttgttttgaggattggaatttccattacattcatcctttgcacacagtaacatccacagaactagtccaactcttaaaaggagagaggaaaaacacaggcaccagttgtcagctcatgcttacaacctgtgtggaagtatatacagttgagagtcacagtggaggttctgagactggattcagtcttgttccagtgacagttggaaggcctctgctggagagacaccagctctcagggcagagattggcttggggccagaaggaccctccccaaccctggagacaccctgaaggttcactggctctccagattagcctctcttcctctgtcaggcaaagatgaggagcccgtgttcccatcgggccctgctggcagggacttgcagtggattcttggtcaggtgtgcccacagatgcggaggcgaggtgagtgattccatcatttcagttctcacctgcagttttggtgaagcaggagatgcaccccacagctctagctctcaaatggcttcacagtccttacttctctacctgcctcaagaaggggctcagagcagagacttgtgaattccttagtaactgtgagtatatgaatgtgttgcacatgtccacagtattggcgagataattacataattcagatacctttaatcatctttcaagaaagaggctcctcccattcaaccaccctagagaactgcctttgttaaatagttatttaaagactcatacatatcaaaccatgactttgaaaggtcttcgaggctggggctctgtaatgaattagtttaaaagccaaggtcataacatgaattgatggtcaatttcccttcagcagaaggaaaaggtgatttagatcagtagctcttttgaaggttgtggctgacctgttcataccgtgtcgcctcatggctagtgtggcgttgaaagagtagcgactgggaagatacaacttacacagtggggcctattgttctttcaagaaccctttttttagcttatagaacccatgggtccagtttagtaacgagtgatttaggcaatcaatgataggtttataatcttagattattccagcaaagtgtggattgcattgttaggaagaacatttggtgggaatgaacactcctgggcataccgctgacttttgtcccttgttcccggtgtaggagacccaaggcatcttgaatcccatctataagaacacaatcttccagcatacgtttgctttttcagaaactctagcattctctttaaatactgacgcaatccttaatggaaaagagatttcatgaagcaaattatgtatttcaatagttcttctatttttagtgtccaaaatttactaatacagaagcttgacaagcatgtcctcaccctccccaccacataaacacatggacacacacccaagccacaagaaatcccaagagagcagaagcgaatttttaaaagatttatcgtgaggactgcatttccattcactaattttggctcaaacttatgaggcaggaaataggggccaacagtaaatgggggaggcctcctgacaccagcagaggaattttgtacccaggcgaggacttcttgaacttctgcgtatctccgtttgatctctttcacctttatttcatcttcataagaatgagaaaggctcaaaaggaagcacttttagaaatcttctctgacctagaagaatccatccaaatccctgccttcctctctgaaccaacagttcccttctctgacaggggccatcctctatcttccatccagcggctcttctttttaggaaggctctggtgcagagcacttcaaatatgtcctcaggccagatactgattgctagtagagagacacccggcacccagtccgaagccctccctcaaaggaccggctcatggcgttggtcactggcaggctcagagacattctgctgtgggcgcagggagcccggccccccatgcagccatgactggatgcgcccccatctcgggggcttgctgcactgcttgtttattgaattttgctacttagaatggcaacattaactttgtgtaccattcattttttaaaaattttccaaagctcggcagtgtatgaaagaaaaaactgggaaagatacttggtttctgttaacttttgtgttgcttgcttaagtgattaaagccagtgcttggagccaagccttcatgccacgaacatgctccacagcctgccctttgctctcctgctcacactgaccaagaatgccgcgtgcttggcctactgaggtgaaaggacaattgaatgacaggtgggcaaagggagaacttccccttcttggtgcgaggaaagtcacaaatttaaaaatgttgcttccagcccagatcctaaatgctagttctcagcagctgcgtggcttaccgttcgccatttccaccaccgccagctgccagcaccgctacagatcacagagatgtgaacagacaatggaaagcactcttagccttgcagtggtctacattttttaggaaccaatatttcagcattctttattacccggcacgctgtgtcctttgcagagttcaagtttatgttactgccagggtcagacagtcatttgctgctgctgctgctgctgctgcttctcgaactggatgcattaggaagctgctgtctgagtgtaggaatgtcttgctaagaaagcaatgtcttccttcatccttttctttcttccctctgcgtgtccttgtttttgtgtaatgcgggagagggttagagctatagagattatatatacactatccgtgcacattatatatatgtagatatacccctatcatgtcagagatctgcatgtcagtttttcagcaactaaggtgcctcatgttctgagttcagcagatataggaaccaagccgccccctcctgcacttgatgctcccacctttgttgtgcctcacttaaaatggtgcttttttcagttgtctgtcttttcttatgtttttatttgtaaggtgctgtatataagttgaatatattatgcacatatcctacccaatgggtagaacaaaaagttgttaatactgtaatataatgtatagatgataccaattttaacagaaatggcatagaatttgtgaatgcctatgtgctttgtcctcttttgtaaggaaatttgcaaatggatgcatacagattaaagtctatgtagtttattttcctattaaatatcaatattataacacaagagaaagaagtgtgaacaaacaagcaacagtttatgaccagcgtatatatagcaatggaaagttgcatctttgctgtgaaaacactttaaagaaaatactttttaaaaaatcccacagctttttggttgccactagacgcttcttattttaatcattttagtaatgctcagctggaccagtgttagttatatttgagtcagaaaaatgttgtttttcaacttgctttataatctcctgcatctatctcctgctgtagcatcacgaaggtgtcaggcaacagtgaaaagtgcacatttttgttgttgcagaaactgtgtcagaggaataagtaaatcagcctgcagcagaagactttgttcagctccagaggcatctgtgaccgtctgtgtccaagtctctctgtgcctttttcttttacaaactgaagctgtggagccaatgaagtaacagtagagattgtagggaaagaatacctcaggaaaaacaaatacacttacaagaagaccctgttcttagaaaatgtgtttagttatgggttagcactagaagagacttggctgtcagccagccaagtgaaggacctctcatccattcccattcatgtcccatcataatacggacccaaaaagcaaactcggttttgccatcagttagaaattacgttttggattgtatattgttacatctctcttccggcttagtttttagtgtctgattgtgacctctgcatttatcttcaaataccctaattttaaaacaaaagaacaagaaaagtttataacaccatgttcactaaaaccacggttgaatcttgggtgtgggcatcctttcgagtgttgtccataagagcagttcgtggaattttgcccatctgacccatattatcagcttattctgccaccagagtagagtctaataaattccaaagtttttatttgctccatggtgtatgttctgactttgaaaatgtcagattctataatcatacccctaacatccaggaaacaaatgacagattatctttaaactgaaattgactctacaatgcaacccttaatgctgaatggattaaaaaagtcagcccttttagtatctgtttgaaagggccgtaaaaagttgacacttttgttgttgtggatcctgcgtgtctagacccacgtgttgtttccatcgtatactgtagggtgcaccccttgggattcatcattaagaactgaggctcactgttgtcagaaacaaagctcccaccccccaggttcaaccttgtgggagaactgttgagcatgagaatgttctagactcagaggtactaaaatttgttaccacatcattgcttcctttctacaggacgaattgaggcttaaactttactgttaatgatactggttcattttaatgtgcttgttggtatgttgctatttttcatttcatagctttcaaaaatcatgctaattgtatacttgtctagtttaaggctattttaaaatatgtacaatactattcacagcatttagttcgtttaatttttattataaagcaatctactaaaaaagtacaactgtatttgaacttttcaatagttgtttgtgagctatgataatcaaaagtcattaaagtcttttttaacaaacattcgtgcttacttttcaacataattcccagttatatacagaaaaagatttccacctgtcacgtatctgcctcttttacctgagcaatggtgtagttcttagacctaaggtctgtaattgcaatacttttaaagaaagatgttgctctaagtgctgtttgttagttatgaaatcagatttttctgcttgttcttaatgctgtggtcaaaccatagcacaaaatcattaaaaataatcagcggcatac

SEQ ID NO: 6 - protein, 288 aa, Homo sapiens
MPEAGFQATNAFTECKFTCTSGKCLYLGSLVCNQQNDCGDNSDEENCLLVTEHPPPGIFNSELEFAQIIIIVVVVTVMVVVIVCLLNHYKVSTRSFINRPNQSRRREDGLPQIMHAPRSRDRFTAPSFIQRDRFSRFQPTYPYVQHEIDLPPTISLSDGEEPPPYQGPCTLQLRDPEQQMELNRESVRAPPNRTIFDSDLIDIAMYSGGPCPPSSNSGISASTCSSNGRMEGPPPTYSEVMGHHPGASFLHHQRSNAHRGSRLQFQQNNAESTIVPIKGKDRKPGNLV

SEQ ID NO: 7 - DNA, 8086 bp, Homo sapiens
  CDS (243)..(989)
ctcagctccctgtggtgggggatggcagaggcttcccgctccccgcagctggtttgcacagcctcccgactgtgccgtggtgtctccttccctaaagtgggacagtcgtttctgtgtcctgctggcctctgaggaacagacgtgtgtgagaggccttcagggcctgatggctggggtggtgacagtgcctggagaatgggtggggactggaggggccaggtggctaaccactctcctcttccatggcagcggagctggagttcgcccaaatcatcatcatcgtcgtggtggtcacggtgatggtggtggtcatcgtctgcctgctgaaccactacaaagtctccacgcggtccttcatcaaccgcccgaaccagagccggaggcgggaggacgggctgccgcaggaagggtgcctgtggccttcagacagcgccgcaccgcggctgggcgcctcggagatcatgcatgccccgcggtccagggacaggttcacagcgccgtccttcatccagagggatcgcttcagccgcttccagcccacctacccctatgtgcagcacgagattgatcttcctcccaccatctccctgtccgacggtgaagagccacctccttaccaggggccctgcaccctgcagctccgggaccctgaacagcagatggaactcaaccgagagtccgtgagggccccacccaaccgaaccatatttgacagtgatttaatagacattgctatgtatagcgggggtccatgcccacccagcagcaactcgggcatcagtgcaagcacctgcagcagtaacgggaggatggaggggccaccccccacatacagcgaggtgatgggccaccacccaggcgcctctttcctccatcaccagcgcagcaacgcacacaggggcagcagactgcagtttcagcagaacaatgcagagagcacaatagtacccatcaaaggcaaagataggaagcctgggaacctggtctgattccttccaacgtgcacttcagctggagaaagaaaccaagaagggaagcggccgctgggcccctcctgcgcacagtgttgttcagtttcacatggtacaaataagtaaaaccaaatgagcaaacacggtctttgtttctgattccttttaggggaattgcatgcaaactagactgaaatgatacaaacttccatctggtctgaccgcaaacagtgtttatttggggacaggggttgggatgggggtgtgggcaggggaaaacagagaacgggatgctttgaagataccatgaaataaaacccacagaggtatttgatgtatttaattgtgaaaggagactttgcagataaatgaggccagaatggcatgttttataattaactgaataaagaaggaagcattattatatattattgtggggaagaaccagccagttcgctttttctcctaaggtgtggaacttttattttgttttaaaaatatgaatcaaaattcctgtgttgtgtgccaaggtataaagtggagaagttagatgagtgcaaggagctcctttgtgttgtgatgatgtgttttaaaagttgcactatcttaatgttgaaaatatttacaagggaactgttttacgtgaagttctgtatgttgtcttttcacctgtggattgtaatcaggcccaaggaatatcctggagtggtccccagaagcatccaagaaaagatatttggggacgtagcctaacattttaccaacttacgtaaatcaaaaaagtcattattgttgcaggagtttgcatcaaatagcagtgcatcgctgaagcttttggagacttttggatggaagataagatagggaagattaagttccagcatttctgacttgttattttgagttactctgctactcttaggctgcatagtttatgagaaaatgaacacatgcatttatggatccagtatcatgcagtgctgccctcatcctccagcagtgcaatttcttcagtaatttagatttttttcactatagcatgaaatatattcaaatacataccttattttatgcaataaattgtttaaaatgcaaggtggttattctgcatactgttgaaatatgtgactcctcagtatattcccattgcctctccccctttcctcgacagcttagttcagttctgcagggctgctcagttcacaggaggctcccagcagccaccccacatccagcctacacagaacttcgtgtgggagtggtgtgggtggtggtttcttatgctttggaagcccctagaaataatgacggaagaatgccatgttgctgatcgtggtaataagccattgtgggttattgtatgtcactagtattagcatagcattcttaaaggaatgcagtgctcaaaacctacccaaattcccgcaggattctaccaaacccttccccaggccagcttttgtactgaaggcaagaactggacagtcagagaacagtggagggggcaagtgactgaagagcaccgggtaaaaagcacaacatgcagttaaaatgcaactagaaaactaattttaaatattgttagttttaatattcctgatatttacaaatattcattcttatatacaatgaaaaaaataactttcttctgcagatgtaagcactggcttttataagagcagcagccaacacgtttagcagacactgcgcgtggagaagggcttatctgcagtacactctgccatgtggagggtgggcctctgtggcctcttcacataacaagatgagctggaatgatgattccatgactcccacctatgcagccttaaagccaaatccgcgtgtgtgtgtttgtgtctgtctgtgggtctcgaaggtgatccgtcggtgcggtggctctgtgctgtaactggagagactgttccaaaccccaagagttgtctgatcctagtctgttcccttctgcttcttacctctgtagataggtcactggtttttgtttgtttgttttgaggattggaatttccattacattcatcctttgcacacagtaacatccacagaactagtccaactcttaaaaggagagaggaaaaacacaggcaccagttgtcagctcatgcttacaacctgtgtggaagtatatacagttgagagtcacagtggaggttctgagactggattcagtcttgttccagtgacagttggaaggcctctgctggagagacaccagctctcagggcagagattggcttggggccagaaggaccctccccaaccctggagacaccctgaaggttcactggctctccagattagcctctcttcctctgtcaggcaaagatgaggagcccgtgttcccatcgggccctgctggcagggacttgcagtggattcttggtcaggtgtgcccacagatgcggaggcgaggtgagtgattccatcatttcagttctcacctgcagttttggtgaagcaggagatgcaccccacagctctagctctcaaatggcttcacagtccttacttctctacctgcctcaagaaggggctcagagcagagacttgtgaattccttagtaactgtgagtatatgaatgtgttgcacatgtccacagtattggcgagataattacataattcagatacctttaatcatctttcaagaaagaggctcctcccattcaaccaccctagagaactgcctttgttaaatagttatttaaagactcatacatatcaaaccatgactttgaaaggtcttcgaggctggggctctgtaatgaattagtttaaaagccaaggtcataacatgaattgatggtcaatttcccttcagcagaaggaaaaggtgatttagatcagtagctcttttgaaggttgtggctgacctgttcataccgtgtcgcctcatggctagtgtggcgttgaaagagtagcgactgggaagatacaacttacacagtggggcctattgttctttcaagaaccctttttttagcttatagaacccatgggtccagtttagtaacgagtgatttaggcaatcaatgataggtttataatcttagattattccagcaaagtgtggattgcattgttaggaagaacatttggtgggaatgaacactcctgggcataccgctgacttttgtcccttgttcccggtgtaggagacccaaggcatcttgaatcccatctataagaacacaatcttccagcatacgtttgctttttcagaaactctagcattctctttaaatactgacgcaatccttaatggaaaagagatttcatgaagcaaattatgtatttcaatagttcttctatttttagtgtccaaaatttactaatacagaagcttgacaagcatgtcctcaccctccccaccacataaacacatggacacacacccaagccacaagaaatcccaagagagcagaagcgaatttttaaaagatttatcgtgaggactgcatttccattcactaattttggctcaaacttatgaggcaggaaataggggccaacagtaaatgggggaggcctcctgacaccagcagaggaattttgtacccaggcgaggacttcttgaacttctgcgtatctccgtttgatctctttcacctttatttcatcttcataagaatgagaaaggctcaaaaggaagcacttttagaaatcttctctgacctagaagaatccatccaaatccctgccttcctctctgaaccaacagttcccttctctgacaggggccatcctctatcttccatccagcggctcttctttttaggaaggctctggtgcagagcacttcaaatatgtcctcaggccagatactgattgctagtagagagacacccggcacccagtccgaagccctccctcaaaggaccggctcatggcgttggtcactggcaggctcagagacattctgctgtgggcgcagggagcccggccccccatgcagccatgactggatgcgcccccatctcgggggcttgctgcactgcttgtttattgaattttgctacttagaatggcaacattaactttgtgtaccattcattttttaaaaattttccaaagctcggcagtgtatgaaagaaaaaactgggaaagatacttggtttctgttaacttttgtgttgcttgcttaagtgattaaagccagtgcttggagccaagccttcatgccacgaacatgctccacagcctgccctttgctctcctgctcacactgaccaagaatgccgcgtgcttggcctactgaggtgaaaggacaattgaatgacaggtgggcaaagggagaacttccccttcttggtgcgaggaaagtcacaaatttaaaaatgttgcttccagcccagatcctaaatgctagttctcagcagctgcgtggcttaccgttcgccatttccaccaccgccagctgccagcaccgctacagatcacagagatgtgaacagacaatggaaagcactcttagccttgcagtggtctacattttttaggaaccaatatttcagcattctttattacccggcacgctgtgtcctttgcagagttcaagtttatgttactgccagggtcagacagtcatttgctgctgctgctgctgctgctgcttctcgaactggatgcattaggaagctgctgtctgagtgtaggaatgtcttgctaagaaagcaatgtcttccttcatccttttctttcttccctctgcgtgtccttgtttttgtgtaatgcgggagagggttagagctatagagattatatatacactatccgtgcacattatatatatgtagatatacccctatcatgtcagagatctgcatgtcagtttttcagcaactaaggtgcctcatgttctgagttcagcagatataggaaccaagccgccccctcctgcacttgatgctcccacctttgttgtgcctcacttaaaatggtgcttttttcagttgtctgtcttttcttatgtttttatttgtaaggtgctgtatataagttgaatatattatgcacatatcctacccaatgggtagaacaaaaagttgttaatactgtaatataatgtatagatgataccaattttaacagaaatggcatagaatttgtgaatgcctatgtgctttgtcctcttttgtaaggaaatttgcaaatggatgcatacagattaaagtctatgtagtttattttcctattaaatatcaatattataacacaagagaaagaagtgtgaacaaacaagcaacagtttatgaccagcgtatatatagcaatggaaagttgcatctttgctgtgaaaacactttaaagaaaatactttttaaaaaatcccacagctttttggttgccactagacgcttcttattttaatcattttagtaatgctcagctggaccagtgttagttatatttgagtcagaaaaatgttgtttttcaacttgctttataatctcctgcatctatctcctgctgtagcatcacgaaggtgtcaggcaacagtgaaaagtgcacatttttgttgttgcagaaactgtgtcagaggaataagtaaatcagcctgcagcagaagactttgttcagctccagaggcatctgtgaccgtctgtgtccaagtctctctgtgcctttttcttttacaaactgaagctgtggagccaatgaagtaacagtagagattgtagggaaagaatacctcaggaaaaacaaatacacttacaagaagaccctgttcttagaaaatgtgtttagttatgggttagcactagaagagacttggctgtcagccagccaagtgaaggacctctcatccattcccattcatgtcccatcataatacggacccaaaaagcaaactcggttttgccatcagttagaaattacgttttggattgtatattgttacatctctcttccggcttagtttttagtgtctgattgtgacctctgcatttatcttcaaataccctaattttaaaacaaaagaacaagaaaagtttataacaccatgttcactaaaaccacggttgaatcttgggtgtgggcatcctttcgagtgttgtccataagagcagttcgtggaattttgcccatctgacccatattatcagcttattctgccaccagagtagagtctaataaattccaaagtttttatttgctccatggtgtatgttctgactttgaaaatgtcagattctataatcatacccctaacatccaggaaacaaatgacagattatctttaaactgaaattgactctacaatgcaacccttaatgctgaatggattaaaaaagtcagcccttttagtatctgtttgaaagggccgtaaaaagttgacacttttgttgttgtggatcctgcgtgtctagacccacgtgttgtttccatcgtatactgtagggtgcaccccttgggattcatcattaagaactgaggctcactgttgtcagaaacaaagctcccaccccccaggttcaaccttgtgggagaactgttgagcatgagaatgttctagactcagaggtactaaaatttgttaccacatcattgcttcctttctacaggacgaattgaggcttaaactttactgttaatgatactggttcattttaatgtgcttgttggtatgttgctatttttcatttcatagctttcaaaaatcatgctaattgtatacttgtctagtttaaggctattttaaaatatgtacaatactattcacagcatttagttcgtttaatttttattataaagcaatctactaaaaaagtacaactgtatttgaacttttcaatagttgtttgtgagctatgataatcaaaagtcattaaagtcttttttaacaaacattcgtgcttacttttcaacataattcccagttatatacagaaaaagatttccacctgtcacgtatctgcctcttttacctgagcaatggtgtagttcttagacctaaggtctgtaattgcaatacttttaaagaaagatgttgctctaagtgctgtttgttagttatgaaatcagatttttctgcttgttcttaatgctgtggtcaaaccatagcacaaaatcattaaaaataatcagcggcatac

SEQ ID NO: 8 - protein, 248 aa, Homo sapiens
MAAELEFAQIIIIVVVVTVMVVVIVCLLNHYKVSTRSFINRPNQSRRREDGLPQEGCLWPSDSAAPRLGASEIMHAPRSRDRFTAPSFIQRDRFSRFQPTYPYVQHEIDLPPTISLSDGEEPPPYQGPCTLQLRDPEQQMELNRESVRAPPNRTIFDSDLIDIAMYSGGPCPPSSNSGISASTCSSNGRMEGPPPTYSEVMGHHPGASFLHHQRSNAHRGSRLQFQQNNAESTIVPIKGKDRKPGNLV

SEQ ID NO: 9 - DNA, 8032 bp, Homo sapiens
  CDS (243)..(935)
ctcagctccctgtggtgggggatggcagaggcttcccgctccccgcagctggtttgcacagcctcccgactgtgccgtggtgtctccttccctaaagtgggacagtcgtttctgtgtcctgctggcctctgaggaacagacgtgtgtgagaggccttcagggcctgatggctggggtggtgacagtgcctggagaatgggtggggactggaggggccaggtggctaaccactctcctcttccatggcagcggagctggagttcgcccaaatcatcatcatcgtcgtggtggtcacggtgatggtggtggtcatcgtctgcctgctgaaccactacaaagtctccacgcggtccttcatcaaccgcccgaaccagagccggaggcgggaggacgggctgccgcagatcatgcatgccccgcggtccagggacaggttcacagcgccgtccttcatccagagggatcgcttcagccgcttccagcccacctacccctatgtgcagcacgagattgatcttcctcccaccatctccctgtccgacggtgaagagccacctccttaccaggggccctgcaccctgcagctccgggaccctgaacagcagatggaactcaaccgagagtccgtgagggccccacccaaccgaaccatatttgacagtgatttaatagacattgctatgtatagcgggggtccatgcccacccagcagcaactcgggcatcagtgcaagcacctgcagcagtaacgggaggatggaggggccaccccccacatacagcgaggtgatgggccaccacccaggcgcctctttcctccatcaccagcgcagcaacgcacacaggggcagcagactgcagtttcagcagaacaatgcagagagcacaatagtacccatcaaaggcaaagataggaagcctgggaacctggtctgattccttccaacgtgcacttcagctggagaaagaaaccaagaagggaagcggccgctgggcccctcctgcgcacagtgttgttcagtttcacatggtacaaataagtaaaaccaaatgagcaaacacggtctttgtttctgattccttttaggggaattgcatgcaaactagactgaaatgatacaaacttccatctggtctgaccgcaaacagtgtttatttggggacaggggttgggatgggggtgtgggcaggggaaaacagagaacgggatgctttgaagataccatgaaataaaacccacagaggtatttgatgtatttaattgtgaaaggagactttgcagataaatgaggccagaatggcatgttttataattaactgaataaagaaggaagcattattatatattattgtggggaagaaccagccagttcgctttttctcctaaggtgtggaacttttattttgttttaaaaatatgaatcaaaattcctgtgttgtgtgccaaggtataaagtggagaagttagatgagtgcaaggagctcctttgtgttgtgatgatgtgttttaaaagttgcactatcttaatgttgaaaatatttacaagggaactgttttacgtgaagttctgtatgttgtcttttcacctgtggattgtaatcaggcccaaggaatatcctggagtggtccccagaagcatccaagaaaagatatttggggacgtagcctaacattttaccaacttacgtaaatcaaaaaagtcattattgttgcaggagtttgcatcaaatagcagtgcatcgctgaagcttttggagacttttggatggaagataagatagggaagattaagttccagcatttctgacttgttattttgagttactctgctactcttaggctgcatagtttatgagaaaatgaacacatgcatttatggatccagtatcatgcagtgctgccctcatcctccagcagtgcaatttcttcagtaatttagatttttttcactatagcatgaaatatattcaaatacataccttattttatgcaataaattgtttaaaatgcaaggtggttattctgcatactgttgaaatatgtgactcctcagtatattcccattgcctctccccctttcctcgacagcttagttcagttctgcagggctgctcagttcacaggaggctcccagcagccaccccacatccagcctacacagaacttcgtgtgggagtggtgtgggtggtggtttcttatgctttggaagcccctagaaataatgacggaagaatgccatgttgctgatcgtggtaataagccattgtgggttattgtatgtcactagtattagcatagcattcttaaaggaatgcagtgctcaaaacctacccaaattcccgcaggattctaccaaacccttccccaggccagcttttgtactgaaggcaagaactggacagtcagagaacagtggagggggcaagtgactgaagagcaccgggtaaaaagcacaacatgcagttaaaatgcaactagaaaactaattttaaatattgttagttttaatattcctgatatttacaaatattcattcttatatacaatgaaaaaaataactttcttctgcagatgtaagcactggcttttataagagcagcagccaacacgtttagcagacactgcgcgtggagaagggcttatctgcagtacactctgccatgtggagggtgggcctctgtggcctcttcacataacaagatgagctggaatgatgattccatgactcccacctatgcagccttaaagccaaatccgcgtgtgtgtgtttgtgtctgtctgtgggtctcgaaggtgatccgtcggtgcggtggctctgtgctgtaactggagagactgttccaaaccccaagagttgtctgatcctagtctgttcccttctgcttcttacctctgtagataggtcactggtttttgtttgtttgttttgaggattggaatttccattacattcatcctttgcacacagtaacatccacagaactagtccaactcttaaaaggagagaggaaaaacacaggcaccagttgtcagctcatgcttacaacctgtgtggaagtatatacagttgagagtcacagtggaggttctgagactggattcagtcttgttccagtgacagttggaaggcctctgctggagagacaccagctctcagggcagagattggcttggggccagaaggaccctccccaaccctggagacaccctgaaggttcactggctctccagattagcctctcttcctctgtcaggcaaagatgaggagcccgtgttcccatcgggccctgctggcagggacttgcagtggattcttggtcaggtgtgcccacagatgcggaggcgaggtgagtgattccatcatttcagttctcacctgcagttttggtgaagcaggagatgcaccccacagctctagctctcaaatggcttcacagtccttacttctctacctgcctcaagaaggggctcagagcagagacttgtgaattccttagtaactgtgagtatatgaatgtgttgcacatgtccacagtattggcgagataattacataattcagatacctttaatcatctttcaagaaagaggctcctcccattcaaccaccctagagaactgcctttgttaaatagttatttaaagactcatacatatcaaaccatgactttgaaaggtcttcgaggctggggctctgtaatgaattagtttaaaagccaaggtcataacatgaattgatggtcaatttcccttcagcagaaggaaaaggtgatttagatcagtagctcttttgaaggttgtggctgacctgttcataccgtgtcgcctcatggctagtgtggcgttgaaagagtagcgactgggaagatacaacttacacagtggggcctattgttctttcaagaaccctttttttagcttatagaacccatgggtccagtttagtaacgagtgatttaggcaatcaatgataggtttataatcttagattattccagcaaagtgtggattgcattgttaggaagaacatttggtgggaatgaacactcctgggcataccgctgacttttgtcccttgttcccggtgtaggagacccaaggcatcttgaatcccatctataagaacacaatcttccagcatacgtttgctttttcagaaactctagcattctctttaaatactgacgcaatccttaatggaaaagagatttcatgaagcaaattatgtatttcaatagttcttctatttttagtgtccaaaatttactaatacagaagcttgacaagcatgtcctcaccctccccaccacataaacacatggacacacacccaagccacaagaaatcccaagagagcagaagcgaatttttaaaagatttatcgtgaggactgcatttccattcactaattttggctcaaacttatgaggcaggaaataggggccaacagtaaatgggggaggcctcctgacaccagcagaggaattttgtacccaggcgaggacttcttgaacttctgcgtatctccgtttgatctctttcacctttatttcatcttcataagaatgagaaaggctcaaaaggaagcacttttagaaatcttctctgacctagaagaatccatccaaatccctgccttcctctctgaaccaacagttcccttctctgacaggggccatcctctatcttccatccagcggctcttctttttaggaaggctctggtgcagagcacttcaaatatgtcctcaggccagatactgattgctagtagagagacacccggcacccagtccgaagccctccctcaaaggaccggctcatggcgttggtcactggcaggctcagagacattctgctgtgggcgcagggagcccggccccccatgcagccatgactggatgcgcccccatctcgggggcttgctgcactgcttgtttattgaattttgctacttagaatggcaacattaactttgtgtaccattcattttttaaaaattttccaaagctcggcagtgtatgaaagaaaaaactgggaaagatacttggtttctgttaacttttgtgttgcttgcttaagtgattaaagccagtgcttggagccaagccttcatgccacgaacatgctccacagcctgccctttgctctcctgctcacactgaccaagaatgccgcgtgcttggcctactgaggtgaaaggacaattgaatgacaggtgggcaaagggagaacttccccttcttggtgcgaggaaagtcacaaatttaaaaatgttgcttccagcccagatcctaaatgctagttctcagcagctgcgtggcttaccgttcgccatttccaccaccgccagctgccagcaccgctacagatcacagagatgtgaacagacaatggaaagcactcttagccttgcagtggtctacattttttaggaaccaatatttcagcattctttattacccggcacgctgtgtcctttgcagagttcaagtttatgttactgccagggtcagacagtcatttgctgctgctgctgctgctgctgcttctcgaactggatgcattaggaagctgctgtctgagtgtaggaatgtcttgctaagaaagcaatgtcttccttcatccttttctttcttccctctgcgtgtccttgtttttgtgtaatgcgggagagggttagagctatagagattatatatacactatccgtgcacattatatatatgtagatatacccctatcatgtcagagatctgcatgtcagtttttcagcaactaaggtgcctcatgttctgagttcagcagatataggaaccaagccgccccctcctgcacttgatgctcccacctttgttgtgcctcacttaaaatggtgcttttttcagttgtctgtcttttcttatgtttttatttgtaaggtgctgtatataagttgaatatattatgcacatatcctacccaatgggtagaacaaaaagttgttaatactgtaatataatgtatagatgataccaattttaacagaaatggcatagaatttgtgaatgcctatgtgctttgtcctcttttgtaaggaaatttgcaaatggatgcatacagattaaagtctatgtagtttattttcctattaaatatcaatattataacacaagagaaagaagtgtgaacaaacaagcaacagtttatgaccagcgtatatatagcaatggaaagttgcatctttgctgtgaaaacactttaaagaaaatactttttaaaaaatcccacagctttttggttgccactagacgcttcttattttaatcattttagtaatgctcagctggaccagtgttagttatatttgagtcagaaaaatgttgtttttcaacttgctttataatctcctgcatctatctcctgctgtagcatcacgaaggtgtcaggcaacagtgaaaagtgcacatttttgttgttgcagaaactgtgtcagaggaataagtaaatcagcctgcagcagaagactttgttcagctccagaggcatctgtgaccgtctgtgtccaagtctctctgtgcctttttcttttacaaactgaagctgtggagccaatgaagtaacagtagagattgtagggaaagaatacctcaggaaaaacaaatacacttacaagaagaccctgttcttagaaaatgtgtttagttatgggttagcactagaagagacttggctgtcagccagccaagtgaaggacctctcatccattcccattcatgtcccatcataatacggacccaaaaagcaaactcggttttgccatcagttagaaattacgttttggattgtatattgttacatctctcttccggcttagtttttagtgtctgattgtgacctctgcatttatcttcaaataccctaattttaaaacaaaagaacaagaaaagtttataacaccatgttcactaaaaccacggttgaatcttgggtgtgggcatcctttcgagtgttgtccataagagcagttcgtggaattttgcccatctgacccatattatcagcttattctgccaccagagtagagtctaataaattccaaagtttttatttgctccatggtgtatgttctgactttgaaaatgtcagattctataatcatacccctaacatccaggaaacaaatgacagattatctttaaactgaaattgactctacaatgcaacccttaatgctgaatggattaaaaaagtcagcccttttagtatctgtttgaaagggccgtaaaaagttgacacttttgttgttgtggatcctgcgtgtctagacccacgtgttgtttccatcgtatactgtagggtgcaccccttgggattcatcattaagaactgaggctcactgttgtcagaaacaaagctcccaccccccaggttcaaccttgtgggagaactgttgagcatgagaatgttctagactcagaggtactaaaatttgttaccacatcattgcttcctttctacaggacgaattgaggcttaaactttactgttaatgatactggttcattttaatgtgcttgttggtatgttgctatttttcatttcatagctttcaaaaatcatgctaattgtatacttgtctagtttaaggctattttaaaatatgtacaatactattcacagcatttagttcgtttaatttttattataaagcaatctactaaaaaagtacaactgtatttgaacttttcaatagttgtttgtgagctatgataatcaaaagtcattaaagtcttttttaacaaacattcgtgcttacttttcaacataattcccagttatatacagaaaaagatttccacctgtcacgtatctgcctcttttacctgagcaatggtgtagttcttagacctaaggtctgtaattgcaatacttttaaagaaagatgttgctctaagtgctgtttgttagttatgaaatcagatttttctgcttgttcttaatgctgtggtcaaaccatagcacaaaatcattaaaaataatcagcggcatac

SEQ ID NO: 10 - protein, 230 aa, Homo sapiens
MAAELEFAQIIIIVVVVTVMVVVIVCLLNHYKVSTRSFINRPNQSRRREDGLPQIMHAPRSRDRFTAPSFIQRDRFSRFQPTYPYVQHEIDLPPTISLSDGEEPPPYQGPCTLQLRDPEQQMELNRESVRAPPNRTIFDSDLIDIAMYSGGPCPPSSNSGISASTCSSNGRMEGPPPTYSEVMGHHPGASFLHHQRSNAHRGSRLQFQQNNAESTIVPIKGKDRKPGNLV

SEQ ID NO: 11 - DNA, 8946 bp, Homo sapiens
  CDS (1040)..(1849)
aggaacattgagcatcctgactttgaaggagtctctgtggtgtttttgtgctaccatacatggggaataatgatgtgaggcagagggagagggaatgaatgggagagccaagagggaagagcgagccggggggaaaggagcgcgcagtgtttcctgctgcggttaggacctcacgccttgccagtacagagctcggtggcaagagccgctgggagctgctcccatcagttagaggatgtggagagggagcaccagaagaggacagcccgcagcctggctcgcagcctgagggacgctgtgggtgctcccagccgggcgagcacgctctgggagcggatctgcaggggagaagcacgcgagcctaacgtgagcgtcccgcctgtcgcgtgtcctgccttggtaagcgccctctccggtccttccacactgaaagcttccagcagagatcaagggaaggagtattgtgtgagacttgcagatttcctcctttctgtctggactggtttgatatttgcctgttgaaaagattactgaacgcagtgtgacaagatgagccgtctagctgcgttctgcttgcctgtgtgtgtgacacgtccaggtgtgaggccaaacctgagaagtgcagactgctcactgatagacgttgctgtaaacagtagtgccctgggtgtacagctggtctcaggatcggagaccccggacttattctctgctcggtgacacggccggcttcctgccgcagagctcctggtttctgttgatggcagttgataattggtagccacagtctgcggtcggagccacagcatttgagtctagcacctggggtgggccctgctgatacagtagagagagagtgaacgaggcagacagaaacacaccccccccccctccacgctcacacactctcccacaccccatgccagctataactgcagctctgagctgcctggagaggagattgccggaagctgaagggatgctttgaacgtgggggggctgcgtcacagttggactcccacttgcagaggacctgattatgtccagtgaccacctgaacaacagcacactgaaggaggctcagttcaaagacctgttcttaaaaaaagcggagctggagttcgcccaaatcatcatcatcgtcgtggtggtcacggtgatggtggtggtcatcgtctgcctgctgaaccactacaaagtctccacgcggtccttcatcaaccgcccgaaccagagccggaggcgggaggacgggctgccgcaggaagggtgcctgtggccttcagacagcgccgcaccgcggctgggcgcctcggagatcatgcatgccccgcggtccagggacaggttcacagcgccgtccttcatccagagggatcgcttcagccgcttccagcccacctacccctatgtgcagcacgagattgatcttcctcccaccatctccctgtccgacggtgaagagccacctccttaccaggggccctgcaccctgcagctccgggaccctgaacagcagatggaactcaaccgagagtccgtgagggccccacccaaccgaaccatatttgacagtgatttaatagacattgctatgtatagcgggggtccatgcccacccagcagcaactcgggcatcagtgcaagcacctgcagcagtaacgggaggatggaggggccaccccccacatacagcgaggtgatgggccaccacccaggcgcctctttcctccatcaccagcgcagcaacgcacacaggggcagcagactgcagtttcagcagaacaatgcagagagcacaatagtacccatcaaaggcaaagataggaagcctgggaacctggtctgattccttccaacgtgcacttcagctggagaaagaaaccaagaagggaagcggccgctgggcccctcctgcgcacagtgttgttcagtttcacatggtacaaataagtaaaaccaaatgagcaaacacggtctttgtttctgattccttttaggggaattgcatgcaaactagactgaaatgatacaaacttccatctggtctgaccgcaaacagtgtttatttggggacaggggttgggatgggggtgtgggcaggggaaaacagagaacgggatgctttgaagataccatgaaataaaacccacagaggtatttgatgtatttaattgtgaaaggagactttgcagataaatgaggccagaatggcatgttttataattaactgaataaagaaggaagcattattatatattattgtggggaagaaccagccagttcgctttttctcctaaggtgtggaacttttattttgttttaaaaatatgaatcaaaattcctgtgttgtgtgccaaggtataaagtggagaagttagatgagtgcaaggagctcctttgtgttgtgatgatgtgttttaaaagttgcactatcttaatgttgaaaatatttacaagggaactgttttacgtgaagttctgtatgttgtcttttcacctgtggattgtaatcaggcccaaggaatatcctggagtggtccccagaagcatccaagaaaagatatttggggacgtagcctaacattttaccaacttacgtaaatcaaaaaagtcattattgttgcaggagtttgcatcaaatagcagtgcatcgctgaagcttttggagacttttggatggaagataagatagggaagattaagttccagcatttctgacttgttattttgagttactctgctactcttaggctgcatagtttatgagaaaatgaacacatgcatttatggatccagtatcatgcagtgctgccctcatcctccagcagtgcaatttcttcagtaatttagatttttttcactatagcatgaaatatattcaaatacataccttattttatgcaataaattgtttaaaatgcaaggtggttattctgcatactgttgaaatatgtgactcctcagtatattcccattgcctctccccctttcctcgacagcttagttcagttctgcagggctgctcagttcacaggaggctcccagcagccaccccacatccagcctacacagaacttcgtgtgggagtggtgtgggtggtggtttcttatgctttggaagcccctagaaataatgacggaagaatgccatgttgctgatcgtggtaataagccattgtgggttattgtatgtcactagtattagcatagcattcttaaaggaatgcagtgctcaaaacctacccaaattcccgcaggattctaccaaacccttccccaggccagcttttgtactgaaggcaagaactggacagtcagagaacagtggagggggcaagtgactgaagagcaccgggtaaaaagcacaacatgcagttaaaatgcaactagaaaactaattttaaatattgttagttttaatattcctgatatttacaaatattcattcttatatacaatgaaaaaaataactttcttctgcagatgtaagcactggcttttataagagcagcagccaacacgtttagcagacactgcgcgtggagaagggcttatctgcagtacactctgccatgtggagggtgggcctctgtggcctcttcacataacaagatgagctggaatgatgattccatgactcccacctatgcagccttaaagccaaatccgcgtgtgtgtgtttgtgtctgtctgtgggtctcgaaggtgatccgtcggtgcggtggctctgtgctgtaactggagagactgttccaaaccccaagagttgtctgatcctagtctgttcccttctgcttcttacctctgtagataggtcactggtttttgtttgtttgttttgaggattggaatttccattacattcatcctttgcacacagtaacatccacagaactagtccaactcttaaaaggagagaggaaaaacacaggcaccagttgtcagctcatgcttacaacctgtgtggaagtatatacagttgagagtcacagtggaggttctgagactggattcagtcttgttccagtgacagttggaaggcctctgctggagagacaccagctctcagggcagagattggcttggggccagaaggaccctccccaaccctggagacaccctgaaggttcactggctctccagattagcctctcttcctctgtcaggcaaagatgaggagcccgtgttcccatcgggccctgctggcagggacttgcagtggattcttggtcaggtgtgcccacagatgcggaggcgaggtgagtgattccatcatttcagttctcacctgcagttttggtgaagcaggagatgcaccccacagctctagctctcaaatggcttcacagtccttacttctctacctgcctcaagaaggggctcagagcagagacttgtgaattccttagtaactgtgagtatatgaatgtgttgcacatgtccacagtattggcgagataattacataattcagatacctttaatcatctttcaagaaagaggctcctcccattcaaccaccctagagaactgcctttgttaaatagttatttaaagactcatacatatcaaaccatgactttgaaaggtcttcgaggctggggctctgtaatgaattagtttaaaagccaaggtcataacatgaattgatggtcaatttcccttcagcagaaggaaaaggtgatttagatcagtagctcttttgaaggttgtggctgacctgttcataccgtgtcgcctcatggctagtgtggcgttgaaagagtagcgactgggaagatacaacttacacagtggggcctattgttctttcaagaaccctttttttagcttatagaacccatgggtccagtttagtaacgagtgatttaggcaatcaatgataggtttataatcttagattattccagcaaagtgtggattgcattgttaggaagaacatttggtgggaatgaacactcctgggcataccgctgacttttgtcccttgttcccggtgtaggagacccaaggcatcttgaatcccatctataagaacacaatcttccagcatacgtttgctttttcagaaactctagcattctctttaaatactgacgcaatccttaatggaaaagagatttcatgaagcaaattatgtatttcaatagttcttctatttttagtgtccaaaatttactaatacagaagcttgacaagcatgtcctcaccctccccaccacataaacacatggacacacacccaagccacaagaaatcccaagagagcagaagcgaatttttaaaagatttatcgtgaggactgcatttccattcactaattttggctcaaacttatgaggcaggaaataggggccaacagtaaatgggggaggcctcctgacaccagcagaggaattttgtacccaggcgaggacttcttgaacttctgcgtatctccgtttgatctctttcacctttatttcatcttcataagaatgagaaaggctcaaaaggaagcacttttagaaatcttctctgacctagaagaatccatccaaatccctgccttcctctctgaaccaacagttcccttctctgacaggggccatcctctatcttccatccagcggctcttctttttaggaaggctctggtgcagagcacttcaaatatgtcctcaggccagatactgattgctagtagagagacacccggcacccagtccgaagccctccctcaaaggaccggctcatggcgttggtcactggcaggctcagagacattctgctgtgggcgcagggagcccggccccccatgcagccatgactggatgcgcccccatctcgggggcttgctgcactgcttgtttattgaattttgctacttagaatggcaacattaactttgtgtaccattcattttttaaaaattttccaaagctcggcagtgtatgaaagaaaaaactgggaaagatacttggtttctgttaacttttgtgttgcttgcttaagtgattaaagccagtgcttggagccaagccttcatgccacgaacatgctccacagcctgccctttgctctcctgctcacactgaccaagaatgccgcgtgcttggcctactgaggtgaaaggacaattgaatgacaggtgggcaaagggagaacttccccttcttggtgcgaggaaagtcacaaatttaaaaatgttgcttccagcccagatcctaaatgctagttctcagcagctgcgtggcttaccgttcgccatttccaccaccgccagctgccagcaccgctacagatcacagagatgtgaacagacaatggaaagcactcttagccttgcagtggtctacattttttaggaaccaatatttcagcattctttattacccggcacgctgtgtcctttgcagagttcaagtttatgttactgccagggtcagacagtcatttgctgctgctgctgctgctgctgcttctcgaactggatgcattaggaagctgctgtctgagtgtaggaatgtcttgctaagaaagcaatgtcttccttcatccttttctttcttccctctgcgtgtccttgtttttgtgtaatgcgggagagggttagagctatagagattatatatacactatccgtgcacattatatatatgtagatatacccctatcatgtcagagatctgcatgtcagtttttcagcaactaaggtgcctcatgttctgagttcagcagatataggaaccaagccgccccctcctgcacttgatgctcccacctttgttgtgcctcacttaaaatggtgcttttttcagttgtctgtcttttcttatgtttttatttgtaaggtgctgtatataagttgaatatattatgcacatatcctacccaatgggtagaacaaaaagttgttaatactgtaatataatgtatagatgataccaattttaacagaaatggcatagaatttgtgaatgcctatgtgctttgtcctcttttgtaaggaaatttgcaaatggatgcatacagattaaagtctatgtagtttattttcctattaaatatcaatattataacacaagagaaagaagtgtgaacaaacaagcaacagtttatgaccagcgtatatatagcaatggaaagttgcatctttgctgtgaaaacactttaaagaaaatactttttaaaaaatcccacagctttttggttgccactagacgcttcttattttaatcattttagtaatgctcagctggaccagtgttagttatatttgagtcagaaaaatgttgtttttcaacttgctttataatctcctgcatctatctcctgctgtagcatcacgaaggtgtcaggcaacagtgaaaagtgcacatttttgttgttgcagaaactgtgtcagaggaataagtaaatcagcctgcagcagaagactttgttcagctccagaggcatctgtgaccgtctgtgtccaagtctctctgtgcctttttcttttacaaactgaagctgtggagccaatgaagtaacagtagagattgtagggaaagaatacctcaggaaaaacaaatacacttacaagaagaccctgttcttagaaaatgtgtttagttatgggttagcactagaagagacttggctgtcagccagccaagtgaaggacctctcatccattcccattcatgtcccatcataatacggacccaaaaagcaaactcggttttgccatcagttagaaattacgttttggattgtatattgttacatctctcttccggcttagtttttagtgtctgattgtgacctctgcatttatcttcaaataccctaattttaaaacaaaagaacaagaaaagtttataacaccatgttcactaaaaccacggttgaatcttgggtgtgggcatcctttcgagtgttgtccataagagcagttcgtggaattttgcccatctgacccatattatcagcttattctgccaccagagtagagtctaataaattccaaagtttttatttgctccatggtgtatgttctgactttgaaaatgtcagattctataatcatacccctaacatccaggaaacaaatgacagattatctttaaactgaaattgactctacaatgcaacccttaatgctgaatggattaaaaaagtcagcccttttagtatctgtttgaaagggccgtaaaaagttgacacttttgttgttgtggatcctgcgtgtctagacccacgtgttgtttccatcgtatactgtagggtgcaccccttgggattcatcattaagaactgaggctcactgttgtcagaaacaaagctcccaccccccaggttcaaccttgtgggagaactgttgagcatgagaatgttctagactcagaggtactaaaatttgttaccacatcattgcttcctttctacaggacgaattgaggcttaaactttactgttaatgatactggttcattttaatgtgcttgttggtatgttgctatttttcatttcatagctttcaaaaatcatgctaattgtatacttgtctagtttaaggctattttaaaatatgtacaatactattcacagcatttagttcgtttaatttttattataaagcaatctactaaaaaagtacaactgtatttgaacttttcaatagttgtttgtgagctatgataatcaaaagtcattaaagtcttttttaacaaacattcgtgcttacttttcaacataattcccagttatatacagaaaaagatttccacctgtcacgtatctgcctcttttacctgagcaatggtgtagttcttagacctaaggtctgtaattgcaatacttttaaagaaagatgttgctctaagtgctgtttgttagttatgaaatcagatttttctgcttgttcttaatgctgtggtcaaaccatagcacaaaatcattaaaaataatcagcggcatac

SEQ ID NO: 12 - protein, 269 aa, Homo sapiens
MSSDHLNNSTLKEAQFKDLFLKKAELEFAQIIIIVVVVTVMVVVIVCLLNHYKVSTRSFINRPNQSRRREDGLPQEGCLWPSDSAAPRLGASEIMHAPRSRDRFTAPSFIQRDRFSRFQPTYPYVQHEIDLPPTISLSDGEEPPPYQGPCTLQLRDPEQQMELNRESVRAPPNRTIFDSDLIDIAMYSGGPCPPSSNSGISASTCSSNGRMEGPPPTYSEVMGHHPGASFLHHQRSNAHRGSRLQFQQNNAESTIVPIKGKDRKPGNLV

SEQ ID NO: 13 - DNA, 8892 bp, Homo sapiens
  CDS (1040)..(1795)
aggaacattgagcatcctgactttgaaggagtctctgtggtgtttttgtgctaccatacatggggaataatgatgtgaggcagagggagagggaatgaatgggagagccaagagggaagagcgagccggggggaaaggagcgcgcagtgtttcctgctgcggttaggacctcacgccttgccagtacagagctcggtggcaagagccgctgggagctgctcccatcagttagaggatgtggagagggagcaccagaagaggacagcccgcagcctggctcgcagcctgagggacgctgtgggtgctcccagccgggcgagcacgctctgggagcggatctgcaggggagaagcacgcgagcctaacgtgagcgtcccgcctgtcgcgtgtcctgccttggtaagcgccctctccggtccttccacactgaaagcttccagcagagatcaagggaaggagtattgtgtgagacttgcagatttcctcctttctgtctggactggtttgatatttgcctgttgaaaagattactgaacgcagtgtgacaagatgagccgtctagctgcgttctgcttgcctgtgtgtgtgacacgtccaggtgtgaggccaaacctgagaagtgcagactgctcactgatagacgttgctgtaaacagtagtgccctgggtgtacagctggtctcaggatcggagaccccggacttattctctgctcggtgacacggccggcttcctgccgcagagctcctggtttctgttgatggcagttgataattggtagccacagtctgcggtcggagccacagcatttgagtctagcacctggggtgggccctgctgatacagtagagagagagtgaacgaggcagacagaaacacaccccccccccctccacgctcacacactctcccacaccccatgccagctataactgcagctctgagctgcctggagaggagattgccggaagctgaagggatgctttgaacgtgggggggctgcgtcacagttggactcccacttgcagaggacctgattatgtccagtgaccacctgaacaacagcacactgaaggaggctcagttcaaagacctgttcttaaaaaaagcggagctggagttcgcccaaatcatcatcatcgtcgtggtggtcacggtgatggtggtggtcatcgtctgcctgctgaaccactacaaagtctccacgcggtccttcatcaaccgcccgaaccagagccggaggcgggaggacgggctgccgcagatcatgcatgccccgcggtccagggacaggttcacagcgccgtccttcatccagagggatcgcttcagccgcttccagcccacctacccctatgtgcagcacgagattgatcttcctcccaccatctccctgtccgacggtgaagagccacctccttaccaggggccctgcaccctgcagctccgggaccctgaacagcagatggaactcaaccgagagtccgtgagggccccacccaaccgaaccatatttgacagtgatttaatagacattgctatgtatagcgggggtccatgcccacccagcagcaactcgggcatcagtgcaagcacctgcagcagtaacgggaggatggaggggccaccccccacatacagcgaggtgatgggccaccacccaggcgcctctttcctccatcaccagcgcagcaacgcacacaggggcagcagactgcagtttcagcagaacaatgcagagagcacaatagtacccatcaaaggcaaagataggaagcctgggaacctggtctgattccttccaacgtgcacttcagctggagaaagaaaccaagaagggaagcggccgctgggcccctcctgcgcacagtgttgttcagtttcacatggtacaaataagtaaaaccaaatgagcaaacacggtctttgtttctgattccttttaggggaattgcatgcaaactagactgaaatgatacaaacttccatctggtctgaccgcaaacagtgtttatttggggacaggggttgggatgggggtgtgggcaggggaaaacagagaacgggatgctttgaagataccatgaaataaaacccacagaggtatttgatgtatttaattgtgaaaggagactttgcagataaatgaggccagaatggcatgttttataattaactgaataaagaaggaagcattattatatattattgtggggaagaaccagccagttcgctttttctcctaaggtgtggaacttttattttgttttaaaaatatgaatcaaaattcctgtgttgtgtgccaaggtataaagtggagaagttagatgagtgcaaggagctcctttgtgttgtgatgatgtgttttaaaagttgcactatcttaatgttgaaaatatttacaagggaactgttttacgtgaagttctgtatgttgtcttttcacctgtggattgtaatcaggcccaaggaatatcctggagtggtccccagaagcatccaagaaaagatatttggggacgtagcctaacattttaccaacttacgtaaatcaaaaaagtcattattgttgcaggagtttgcatcaaatagcagtgcatcgctgaagcttttggagacttttggatggaagataagatagggaagattaagttccagcatttctgacttgttattttgagttactctgctactcttaggctgcatagtttatgagaaaatgaacacatgcatttatggatccagtatcatgcagtgctgccctcatcctccagcagtgcaatttcttcagtaatttagatttttttcactatagcatgaaatatattcaaatacataccttattttatgcaataaattgtttaaaatgcaaggtggttattctgcatactgttgaaatatgtgactcctcagtatattcccattgcctctccccctttcctcgacagcttagttcagttctgcagggctgctcagttcacaggaggctcccagcagccaccccacatccagcctacacagaacttcgtgtgggagtggtgtgggtggtggtttcttatgctttggaagcccctagaaataatgacggaagaatgccatgttgctgatcgtggtaataagccattgtgggttattgtatgtcactagtattagcatagcattcttaaaggaatgcagtgctcaaaacctacccaaattcccgcaggattctaccaaacccttccccaggccagcttttgtactgaaggcaagaactggacagtcagagaacagtggagggggcaagtgactgaagagcaccgggtaaaaagcacaacatgcagttaaaatgcaactagaaaactaattttaaatattgttagttttaatattcctgatatttacaaatattcattcttatatacaatgaaaaaaataactttcttctgcagatgtaagcactggcttttataagagcagcagccaacacgtttagcagacactgcgcgtggagaagggcttatctgcagtacactctgccatgtggagggtgggcctctgtggcctcttcacataacaagatgagctggaatgatgattccatgactcccacctatgcagccttaaagccaaatccgcgtgtgtgtgtttgtgtctgtctgtgggtctcgaaggtgatccgtcggtgcggtggctctgtgctgtaactggagagactgttccaaaccccaagagttgtctgatcctagtctgttcccttctgcttcttacctctgtagataggtcactggtttttgtttgtttgttttgaggattggaatttccattacattcatcctttgcacacagtaacatccacagaactagtccaactcttaaaaggagagaggaaaaacacaggcaccagttgtcagctcatgcttacaacctgtgtggaagtatatacagttgagagtcacagtggaggttctgagactggattcagtcttgttccagtgacagttggaaggcctctgctggagagacaccagctctcagggcagagattggcttggggccagaaggaccctccccaaccctggagacaccctgaaggttcactggctctccagattagcctctcttcctctgtcaggcaaagatgaggagcccgtgttcccatcgggccctgctggcagggacttgcagtggattcttggtcaggtgtgcccacagatgcggaggcgaggtgagtgattccatcatttcagttctcacctgcagttttggtgaagcaggagatgcaccccacagctctagctctcaaatggcttcacagtccttacttctctacctgcctcaagaaggggctcagagcagagacttgtgaattccttagtaactgtgagtatatgaatgtgttgcacatgtccacagtattggcgagataattacataattcagatacctttaatcatctttcaagaaagaggctcctcccattcaaccaccctagagaactgcctttgttaaatagttatttaaagactcatacatatcaaaccatgactttgaaaggtcttcgaggctggggctctgtaatgaattagtttaaaagccaaggtcataacatgaattgatggtcaatttcccttcagcagaaggaaaaggtgatttagatcagtagctcttttgaaggttgtggctgacctgttcataccgtgtcgcctcatggctagtgtggcgttgaaagagtagcgactgggaagatacaacttacacagtggggcctattgttctttcaagaaccctttttttagcttatagaacccatgggtccagtttagtaacgagtgatttaggcaatcaatgataggtttataatcttagattattccagcaaagtgtggattgcattgttaggaagaacatttggtgggaatgaacactcctgggcataccgctgacttttgtcccttgttcccggtgtaggagacccaaggcatcttgaatcccatctataagaacacaatcttccagcatacgtttgctttttcagaaactctagcattctctttaaatactgacgcaatccttaatggaaaagagatttcatgaagcaaattatgtatttcaatagttcttctatttttagtgtccaaaatttactaatacagaagcttgacaagcatgtcctcaccctccccaccacataaacacatggacacacacccaagccacaagaaatcccaagagagcagaagcgaatttttaaaagatttatcgtgaggactgcatttccattcactaattttggctcaaacttatgaggcaggaaataggggccaacagtaaatgggggaggcctcctgacaccagcagaggaattttgtacccaggcgaggacttcttgaacttctgcgtatctccgtttgatctctttcacctttatttcatcttcataagaatgagaaaggctcaaaaggaagcacttttagaaatcttctctgacctagaagaatccatccaaatccctgccttcctctctgaaccaacagttcccttctctgacaggggccatcctctatcttccatccagcggctcttctttttaggaaggctctggtgcagagcacttcaaatatgtcctcaggccagatactgattgctagtagagagacacccggcacccagtccgaagccctccctcaaaggaccggctcatggcgttggtcactggcaggctcagagacattctgctgtgggcgcagggagcccggccccccatgcagccatgactggatgcgcccccatctcgggggcttgctgcactgcttgtttattgaattttgctacttagaatggcaacattaactttgtgtaccattcattttttaaaaattttccaaagctcggcagtgtatgaaagaaaaaactgggaaagatacttggtttctgttaacttttgtgttgcttgcttaagtgattaaagccagtgcttggagccaagccttcatgccacgaacatgctccacagcctgccctttgctctcctgctcacactgaccaagaatgccgcgtgcttggcctactgaggtgaaaggacaattgaatgacaggtgggcaaagggagaacttccccttcttggtgcgaggaaagtcacaaatttaaaaatgttgcttccagcccagatcctaaatgctagttctcagcagctgcgtggcttaccgttcgccatttccaccaccgccagctgccagcaccgctacagatcacagagatgtgaacagacaatggaaagcactcttagccttgcagtggtctacattttttaggaaccaatatttcagcattctttattacccggcacgctgtgtcctttgcagagttcaagtttatgttactgccagggtcagacagtcatttgctgctgctgctgctgctgctgcttctcgaactggatgcattaggaagctgctgtctgagtgtaggaatgtcttgctaagaaagcaatgtcttccttcatccttttctttcttccctctgcgtgtccttgtttttgtgtaatgcgggagagggttagagctatagagattatatatacactatccgtgcacattatatatatgtagatatacccctatcatgtcagagatctgcatgtcagtttttcagcaactaaggtgcctcatgttctgagttcagcagatataggaaccaagccgccccctcctgcacttgatgctcccacctttgttgtgcctcacttaaaatggtgcttttttcagttgtctgtcttttcttatgtttttatttgtaaggtgctgtatataagttgaatatattatgcacatatcctacccaatgggtagaacaaaaagttgttaatactgtaatataatgtatagatgataccaattttaacagaaatggcatagaatttgtgaatgcctatgtgctttgtcctcttttgtaaggaaatttgcaaatggatgcatacagattaaagtctatgtagtttattttcctattaaatatcaatattataacacaagagaaagaagtgtgaacaaacaagcaacagtttatgaccagcgtatatatagcaatggaaagttgcatctttgctgtgaaaacactttaaagaaaatactttttaaaaaatcccacagctttttggttgccactagacgcttcttattttaatcattttagtaatgctcagctggaccagtgttagttatatttgagtcagaaaaatgttgtttttcaacttgctttataatctcctgcatctatctcctgctgtagcatcacgaaggtgtcaggcaacagtgaaaagtgcacatttttgttgttgcagaaactgtgtcagaggaataagtaaatcagcctgcagcagaagactttgttcagctccagaggcatctgtgaccgtctgtgtccaagtctctctgtgcctttttcttttacaaactgaagctgtggagccaatgaagtaacagtagagattgtagggaaagaatacctcaggaaaaacaaatacacttacaagaagaccctgttcttagaaaatgtgtttagttatgggttagcactagaagagacttggctgtcagccagccaagtgaaggacctctcatccattcccattcatgtcccatcataatacggacccaaaaagcaaactcggttttgccatcagttagaaattacgttttggattgtatattgttacatctctcttccggcttagtttttagtgtctgattgtgacctctgcatttatcttcaaataccctaattttaaaacaaaagaacaagaaaagtttataacaccatgttcactaaaaccacggttgaatcttgggtgtgggcatcctttcgagtgttgtccataagagcagttcgtggaattttgcccatctgacccatattatcagcttattctgccaccagagtagagtctaataaattccaaagtttttatttgctccatggtgtatgttctgactttgaaaatgtcagattctataatcatacccctaacatccaggaaacaaatgacagattatctttaaactgaaattgactctacaatgcaacccttaatgctgaatggattaaaaaagtcagcccttttagtatctgtttgaaagggccgtaaaaagttgacacttttgttgttgtggatcctgcgtgtctagacccacgtgttgtttccatcgtatactgtagggtgcaccccttgggattcatcattaagaactgaggctcactgttgtcagaaacaaagctcccaccccccaggttcaaccttgtgggagaactgttgagcatgagaatgttctagactcagaggtactaaaatttgttaccacatcattgcttcctttctacaggacgaattgaggcttaaactttactgttaatgatactggttcattttaatgtgcttgttggtatgttgctatttttcatttcatagctttcaaaaatcatgctaattgtatacttgtctagtttaaggctattttaaaatatgtacaatactattcacagcatttagttcgtttaatttttattataaagcaatctactaaaaaagtacaactgtatttgaacttttcaatagttgtttgtgagctatgataatcaaaagtcattaaagtcttttttaacaaacattcgtgcttacttttcaacataattcccagttatatacagaaaaagatttccacctgtcacgtatctgcctcttttacctgagcaatggtgtagttcttagacctaaggtctgtaattgcaatacttttaaagaaagatgttgctctaagtgctgtttgttagttatgaaatcagatttttctgcttgttcttaatgctgtggtcaaaccatagcacaaaatcattaaaaataatcagcggcatac

SEQ ID NO: 14 - protein, 251 aa, Homo sapiens
MSSDHLNNSTLKEAQFKDLFLKKAELEFAQIIIIVVVVTVMVVVIVCLLNHYKVSTRSFINRPNQSRRREDGLPQIMHAPRSRDRFTAPSFIQRDRFSRFQPTYPYVQHEIDLPPTISLSDGEEPPPYQGPCTLQLRDPEQQMELNRESVRAPPNRTIFDSDLIDIAMYSGGPCPPSSNSGISASTCSSNGRMEGPPPTYSEVMGHHPGASFLHHQRSNAHRGSRLQFQQNNAESTIVPIKGKDRKPGNLV

SEQ ID NO: 15 - DNA, 4909 bp, Homo sapiens
  CDS (83)..(1792)
tagacgcaccctctgaagatggtgactccctcctgagaagctggaccccttggtaaaagacaaggccttctccaagaagaatatgaaagtgttactcagacttatttgtttcatagctctactgatttcttctctggaggctgataaatgcaaggaacgtgaagaaaaaataattttagtgtcatctgcaaatgaaattgatgttcgtccctgtcctcttaacccaaatgaacacaaaggcactataacttggtataaagatgacagcaagacacctgtatctacagaacaagcctccaggattcatcaacacaaagagaaactttggtttgttcctgctaaggtggaggattcaggacattactattgcgtggtaagaaattcatcttactgcctcagaattaaaataagtgcaaaatttgtggagaatgagcctaacttatgttataatgcacaagccatatttaagcagaaactacccgttgcaggagacggaggacttgtgtgcccttatatggagttttttaaaaatgaaaataatgagttacctaaattacagtggtataaggattgcaaacctctacttcttgacaatatacactttagtggagtcaaagataggctcatcgtgatgaatgtggctgaaaagcatagagggaactatacttgtcatgcatcctacacatacttgggcaagcaatatcctattacccgggtaatagaatttattactctagaggaaaacaaacccacaaggcctgtgattgtgagcccagctaatgagacaatggaagtagacttgggatcccagatacaattgatctgtaatgtcaccggccagttgagtgacattgcttactggaagtggaatgggtcagtaattgatgaagatgacccagtgctaggggaagactattacagtgtggaaaatcctgcaaacaaaagaaggagtaccctcatcacagtgcttaatatatcggaaattgaaagtagattttataaacatccatttacctgttttgccaagaatacacatggtatagatgcagcatatatccagttaatatatccagtcactaatttccagaagcacatgattggtatatgtgtcacgttgacagtcataattgtgtgttctgttttcatctataaaatcttcaagattgacattgtgctttggtacagggattcctgctatgattttctcccaataaaagcttcagatggaaagacctatgacgcatatatactgtatccaaagactgttggggaagggtctacctctgactgtgatatttttgtgtttaaagtcttgcctgaggtcttggaaaaacagtgtggatataagctgttcatttatggaagggatgactacgttggggaagacattgttgaggtcattaatgaaaacgtaaagaaaagcagaagactgattatcattttagtcagagaaacatcaggcttcagctggctgggtggttcatctgaagagcaaatagccatgtataatgctcttgttcaggatggaattaaagttgtcctgcttgagctggagaaaatccaagactatgagaaaatgccagaatcgattaaattcattaagcagaaacatggggctatccgctggtcaggggactttacacagggaccacagtctgcaaagacaaggttctggaagaatgtcaggtaccacatgccagtccagcgacggtcaccttcatctaaacaccagttactgtcaccagccactaaggagaaactgcaaagagaggctcacgtgcctctcgggtagcatggagaagttgccaagagttctttaggtgcctcctgtcttatggcgttgcaggccaggttatgcctcatgctgacttgcagagttcatggaatgtaactatatcatcctttatccctgaggtcacctggaatcagattattaagggaataagccatgacgtcaatagcagcccagggcacttcagagtagagggcttgggaagatcttttaaaaaggcagtaggcccggtgtggtggctcacgcctataatcccagcactttgggaggctgaagtgggtggatcaccagaggtcaggagttcgagaccagcccagccaacatggcaaaaccccatctctactaaaaatacaaaaatgagctaggcatggtggcacacgcctgtaatcccagctacacctgaggctgaggcaggagaattgcttgaaccggggagacggaggttgcagtgagccgagtttgggccactgcactctagcctggcaacagagcaagactccgtctcaaaaaaagggcaataaatgccctctctgaatgtttgaactgccaagaaaaggcatggagacagcgaactagaagaaagggcaagaaggaaatagccaccgtctacagatggcttagttaagtcatccacagcccaagggcggggctatgccttgtctggggaccctgtagagtcactgaccctggagcggctctcctgagaggtgctgcaggcaaagtgagactgacacctcactgaggaagggagacatattcttggagaactttccatctgcttgtattttccatacacatccccagccagaagttagtgtccgaagaccgaattttattttacagagcttgaaaactcacttcaatgaacaaagggattctccaggattccaaagttttgaagtcatcttagctttccacaggagggagagaacttaaaaaagcaacagtagcagggaattgatccacttcttaatgctttcctccctggcatgaccatcctgtcctttgttattatcctgcattttacgtctttggaggaacagctccctagtggcttcctccgtctgcaatgtcccttgcacagcccacacatgaaccatccttcccatgatgccgctcttctgtcatcccgctcctgctgaaacacctcccaggggctccacctgttcaggagctgaagcccatgctttcccaccagcatgtcactcccagaccacctccctgccctgtcctccagcttcccctcgctgtcctgctgtgtgaattcccaggttggcctggtggccatgtcgcctgcccccagcactcctctgtctctgctcttgcctcgacccttcctcctcctttgcctaggaggccttctcgcattttctctagctgatcagaattttaccaaaattcagaacatcctccaattccacagtctctgggagactttccctaagaggcgacttcctctccagccttctctctctggtcaggcccactgcagagatggtggtgagcacatctgggaggctggtctccctccagctggaattgctgctctctgagggagaggctgtggtggctgtctctgtccctcactgccttccaggagcaatttgcacatgtaacatagatttatgtaatgctttatgtttaaaaacattccccaattatcttatttaatttttgcaattattctaattttatatatagagaaagtgacctattttttaaaaaaatcacactctaagttctattgaacctaggacttgagcctccatttctggcttctagtctggtgttctgagtacttgatttcaggtcaataacggtcccccctcactccacactggcacgtttgtgagaagaaatgacattttgctaggaagtgaccgagtctaggaatgcttttattcaagacaccaaattccaaacttctaaatgttggaattttcaaaaattgtgtttagattttatgaaaaactcttctactttcatctattctttccctagaggcaaacatttcttaaaatgtttcattttcattaaaaatgaaagccaaatttatatgccaccgattgcaggacacaagcacagttttaagagttgtatgaacatggagaggacttttggtttttatatttctcgtatttaatatgggtgaacaccaacttttatttggaataataattttcctcctaaacaaaaacacattgagtttaagtctctgactcttgcctttccacctgctttctcctgggcccgctttgcctgcttgaaggaacagtgctgttctggagctgctgttccaacagacagggcctagctttcatttgacacacagactacagccagaagcccatggagcagggatgtcacgtcttgaaaagcctattagatgttttacaaatttaattttgcagattattttagtctgtcatccagaaaatgtgtcagcatgcatagtgctaagaaagcaagccaatttggaaacttaggttagtgacaaaattggccagagagtgggggtgatgatgaccaagaattacaagtagaatggcagctggaatttaaggagggacaagaatcaatggataagcgtgggtggaggaagatccaaacagaaaagtgcaaagttattccccatcttccaagggttgaattctggaggaagaagacacattcctagttccccgtgaacttcctttgacttattgtccccactaaaacaaaacaaaaaacttttaatgccttccacattaattagattttcttgcagtttttttatggcatttttttaaagatgccctaagtgttgaagaagagtttgcaaatgcaacaaaatatttaattaccggttgttaaaactggtttagcacaatttatattttccctctcttgcctttcttatttgcaataaaaggtattgagccattttttaaatgacatttttgataaattatgtttgtactagttgatgaaggagttttttttaacctgtttatataattttgcagcagaagccaaattttttgtatattaaagcaccaaattcatgtacagcatgcatcacggatcaatagactgtacttattttccaataaaattttcaaactttgtactgttaaa

SEQ ID NO: 16 - protein, 569 aa, Homo sapiens
MKVLLRLICFIALLISSLEADKCKEREEKIILVSSANEIDVRPCPLNPNEHKGTITWYKDDSKTPVSTEQASRIHQHKEKLWFVPAKVEDSGHYYCVVRNSSYCLRIKISAKFVENEPNLCYNAQAIFKQKLPVAGDGGLVCPYMEFFKNENNELPKLQWYKDCKPLLLDNIHFSGVKDRLIVMNVAEKHRGNYTCHASYTYLGKQYPITRVIEFITLEENKPTRPVIVSPANETMEVDLGSQIQLICNVTGQLSDIAYWKWNGSVIDEDDPVLGEDYYSVENPANKRRSTLITVLNISEIESRFYKHPFTCFAKNTHGIDAAYIQLIYPVTNFQKHMIGICVTLTVIIVCSVFIYKIFKIDIVLWYRDSCYDFLPIKASDGKTYDAYILYPKTVGEGSTSDCDIFVFKVLPEVLEKQCGYKLFIYGRDDYVGEDIVEVINENVKKSRRLIIILVRETSGFSWLGGSSEEQIAMYNALVQDGIKVVLLELEKIQDYEKMPESIKFIKQKHGAIRWSGDFTQGPQSAKTRFWKNVRYHMPVQRRSPSSKHQLLSPATKEKLQREAHVPLG

SEQ ID NO: 17 - DNA, 1258 bp, Homo sapiens
  CDS (186)..(866)
tccactcacagcctgaagcatacccggcaggggctgtccccaggcccaacaagcaaagggcccagtagcgagggccactggagcccatctccggggggctgggcaggaagtagggtggggtttggggtagggatctggtaccctgggactgctgcaactcaaactaaccaacccactgggagaagatgcctgggggtccaggagtcctccaagctctgcctgccaccatcttcctcctcttcctgctgtctgctgtctacctgggccctgggtgccaggccctgtggatgcacaaggtcccagcatcattgatggtgagcctgggggaagacgcccacttccaatgcccgcacaatagcagcaacaacgccaacgtcacctggtggcgcgtcctccatggcaactacacgtggccccctgagttcttgggcccgggcgaggaccccaatggtacgctgatcatccagaatgtgaacaagagccatgggggcatatacgtgtgccgggtccaggagggcaacgagtcataccagcagtcctgcggcacctacctccgcgtgcgccagccgccccccaggcccttcctggacatgggggagggcaccaagaaccgaatcatcacagccgaggggatcatcctcctgttctgcgcggtggtgcctgggacgctgctgctgttcaggaaacgatggcagaacgagaagctcgggttggatgccggggatgaatatgaagatgaaaacctttatgaaggcctgaacctggacgactgctccatgtatgaggacatctcccggggcctccagggcacctaccaggatgtgggcagcctcaacataggagatgtccagctggagaagccgtgacacccctactcctgccaggctgcccccgcctgctgtgcacccagctccagtgtctcagctcacttccctgggacattctcctttcagcccttctgggggcttccttagtcatattcccccagtggggggtgggagggtaacctcactcttctccaggccaggcctccttggactcccctgggggtgtcccactcttcttccctctaaactgccccacctcctaacctaatccccccgccccgctgcctttcccaggctcccctcaccccagcgggtaatgagcccttaatcgctgcctctaggggagctgattgtagcagcctcgttagtgtcaccccctcctccctgatctgtcagggccacttagtgataataaattcttcccaactgca

SEQ ID NO: 18 - protein, 226 aa, Homo sapiens
MPGGPGVLQALPATIFLLFLLSAVYLGPGCQALWMHKVPASLMVSLGEDAHFQCPHNSSNNANVTWWRVLHGNYTWPPEFLGPGEDPNGTLIIQNVNKSHGGIYVCRVQEGNESYQQSCGTYLRVRQPPPRPFLDMGEGTKNRIITAEGIILLFCAVVPGTLLLFRKRWQNEKLGLDAGDEYEDENLYEGLNLDDCSMYEDISRGLQGTYQDVGSLNIGDVQLEKP

SEQ ID NO: 19 - DNA, 1144 bp, Homo sapiens
  CDS (186)..(752)
tccactcacagcctgaagcatacccggcaggggctgtccccaggcccaacaagcaaagggcccagtagcgagggccactggagcccatctccggggggctgggcaggaagtagggtggggtttggggtagggatctggtaccctgggactgctgcaactcaaactaaccaacccactgggagaagatgcctgggggtccaggagtcctccaagctctgcctgccaccatcttcctcctcttcctgctgtctgctgtctacctgggccctgggtgccaggccctgtggatgcacaaggtcccagcatcattgatggtgagcctgggggaagacgcccacttccaatgcccgcacaatagcagcaacaacgccaacgtcacctggtggcgcgtcctccatggcaactacacgtggccccctgagttcttgggcccgggcgaggaccccaatgagccgccccccaggcccttcctggacatgggggagggcaccaagaaccgaatcatcacagccgaggggatcatcctcctgttctgcgcggtggtgcctgggacgctgctgctgttcaggaaacgatggcagaacgagaagctcgggttggatgccggggatgaatatgaagatgaaaacctttatgaaggcctgaacctggacgactgctccatgtatgaggacatctcccggggcctccagggcacctaccaggatgtgggcagcctcaacataggagatgtccagctggagaagccgtgacacccctactcctgccaggctgcccccgcctgctgtgcacccagctccagtgtctcagctcacttccctgggacattctcctttcagcccttctgggggcttccttagtcatattcccccagtggggggtgggagggtaacctcactcttctccaggccaggcctccttggactcccctgggggtgtcccactcttcttccctctaaactgccccacctcctaacctaatccccccgccccgctgcctttcccaggctcccctcaccccagcgggtaatgagcccttaatcgctgcctctaggggagctgattgtagcagcctcgttagtgtcaccccctcctccctgatctgtcagggccacttagtgataataaattcttcccaactgca

SEQ ID NO: 20 - protein, 188 aa, Homo sapiens
MPGGPGVLQALPATIFLLFLLSAVYLGPGCQALWMHKVPASLMVSLGEDAHFQCPHNSSNNANVTWWRVLHGNYTWPPEFLGPGEDPNEPPPRPFLDMGEGTKNRIITAEGIILLFCAVVPGTLLLFRKRWQNEKLGLDAGDEYEDENLYEGLNLDDCSMYEDISRGLQGTYQDVGSLNIGDVQLEKP

SEQ ID NO: 21 - DNA, 11331 bp, Homo sapiens
  CDS (45)..(6692)
tttttttttccccaagcgaagcatgaacagttgctaagtggaaaatggaggctgaattttacatggtgattcttacctgcttgatcttcaggaactcagaagggtttcagattgtccatgtccagaaacaacagtgtcttttcaaaaatgagaaagtggtcgtgggctcatgcaacaggaccatccagaaccagcagtggatgtggactgaggatgaaaagctccttcatgttaaatctgcactgtgcttggccatctccaactcttcccgcggcccctcccgctcagccatcttggaccgctgttcccaggcaccccgatggacctgctatgatcaggaaggcttccttgaggtggaaaatgcctctctctttctccagaaacaaggctccagagtagtggtcaagaaggccaggaaatacctccatagctggatgaaaatagatgtcaacaaggagggaaaactggtcaatgaaagcctctgtttacaaaaagctggcctgggagcagaagtttcggtgaggagcactagaaacacggctccaccccagattctcactacctttaatgcagttccagatggcctggtattccttattaggaataccacagaggccttcatcagaaatgctgcagaaaactacagccaaaacagcagcgagaggcagcatcccaatctgcacatgactggaattacagacacatcatgggttttgtcgactactcagcccttctccagcaccactgaagagactggactggcggagccagagagatgtaacttcaccctggcggagtccaaggcctccagccattctgtgtctatccagtggagaattttgggctcaccctgtaactttagcctcatctatagcagtgacaccctgggggccgcgttgtgccctacctttcggatagacaacaccacatacggatgtaaccttcaagatttacaagcaggaaccatctataacttcaggattatttctctggatgaagagagaacagtggtcttgcaaacagatcctttacctcctgctaggtttggagtcagtaaagagaagacgacttcaaccagcttgcatgtttggtggactccttcttccggaaaagtcacctcatatgaggtgcaattatttgatgaaaataaccaaaagatacagggggttcaaattcaagaaagtacttcatggaatgaatacacttttttcaatctcactgctggtagtaaatacaatattgccatcacagctgtttctggaggaaaacgttctttttcagtttataccaatggatcaacagtgccatctccagtgaaagatattggtatttccacaaaagccaattctctcctgatttcctggtcccatggttctgggaatgtggaacgataccggctgatgctaatggataaagggatcctagttcatggcggtgttgtggacaaacatgctacttcctatgcttttcacgggctgacccctggctacctctacaacctcactgttatgactgaggctgcagggctgcaaaactacaggtggaaactagtcaggacagcccccatggaagtctcaaatctgaaggtgacaaatgatggcagtttgacctctctaaaagtcaaatggcaaagacctcctggaaatgtggattcttacaatatcaccctgtctcacaaagggaccatcaaggaatccagagtattagcaccttggattactgaaactcactttaaagagttagtccccggtcgactttatcaagttactgtcagctgtgtctctggtgaactgtctgctcagaagatggcagtgggcagaacatttccagacaaagttgcaaacctggaggcaaacaataatggcaggatgaggtctcttgtagtgagctggtcgccccctgctggagactgggagcagtatcggatcctactcttcaatgattctgtggtgctgctcaacatcactgtgggaaaggaagaaacacagtatgtcatggatgacacggggctcgtaccgggaagacagtatgaggtggaagtcattgttgagagtggaaatttgaagaattctgagcgttgccaaggcaggacagtccccctggctgtcctccagcttcgtgtcaaacatgccaatgaaacctcactgagtatcatgtggcagacccctgtagcagaatgggagaaatacatcatttccctagctgacagagacctcttactgatccacaagtcactctccaaagatgccaaagaattcacttttactgacctggtgcctggacgaaaatacatggctacagtcaccagtattagtggagacttaaaaaattcctcttcagtaaaaggaagaacagtgcctgcccaagtgactgacttgcatgtggccaaccaaggaatgaccagtagtctgtttactaactggacccaggcacaaggagacgtagaattttaccaagtcttactgatccatgaaaatgtggtcattaaaaatgaaagcatctccagtgagaccagcagatacagcttccactctctcaagtccggcagcctgtactccgtggtggtaacaacagtgagtggagggatctcttcccgacaagtggttgtggagggaagaacagtcccttccagtgtgagtggagtaacggtgaacaattccggtcgtaatgactacctcagcgtttcctggctgctggcgcccggagatgtggataactatgaggtaacattgtctcatgacggcaaggtggttcagtcccttgtcattgccaagtctgtcagagaatgttccttcagctccctcaccccaggccgcctctacaccgtgaccataactacaaggagtggcaagtatgaaaatcactccttcagccaagagcggacagtgcctgacaaagtccagggagtcagtgttagcaactcagccaggagtgactatttaagggtatcctgggtgcatgccactggagactttgatcactatgaagtcaccattaaaaacaaaaacaacttcattcaaactaaaagcattcccaagtcagaaaacgaatgtgtatttgttcagctagtccctggacggttgtacagtgtcactgttactacaaaaagtggacaatatgaagccaatgaacaagggaatgggagaacaattccagagcctgttaaggatctaacattgcgcaacaggagcactgaggacttgcatgtgacttggtcaggagctaatggggatgtcgaccaatatgagatccagctgctcttcaatgacatgaaagtatttcctccttttcaccttgtaaataccgcaaccgagtatcgatttacttccctaacaccaggccgccaatacaaaattcttgtcttgacgattagcggggatgtacagcagtcagccttcattgagggcttcacagttcctagtgctgtcaaaaatattcacatttctcccaatggagcaacagatagcctgacggtgaactggactcctggtgggggagacgttgattcctacacggtgtcggcattcaggcacagtcaaaaggttgactctcagactattcccaagcacgtctttgagcacacgttccacagactggaggccggggagcagtaccagatcatgattgcctcagtcagcgggtccctgaagaatcagataaatgtggttgggcggacagttccagcatctgtccaaggagtaattgcagacaatgcatacagcagttattccttaatagtaagttggcaaaaagctgctggtgtggcagaaagatatgatatcctgcttctaactgaaaatggaatccttctgcgcaacacatcagagccagccaccactaagcaacacaaatttgaagatctaacaccaggcaagaaatacaagatacagatcctaactgtcagtggaggcctctttagcaaggaagcccagactgaaggccgaacagtcccagcagctgtcaccgacctgaggatcacagagaactccaccaggcacctgtccttccgctggaccgcctcagagggggagctcagctggtacaacatctttttgtacaacccagatgggaatctccaggagagagctcaagttgacccactagtccagagcttctctttccagaacttgctacaaggcagaatgtacaagatggtgattgtaactcacagtggggagctgtctaatgagtctttcatatttggtagaacagtcccagcctctgtgagtcatctcagggggtccaatcggaacacgacagacagcctttggttcaactggagtccagcctctggggactttgacttttatgagctgattctctataatcccaatggcacaaagaaggaaaactggaaagacaaggacctgacggagtggcggtttcaaggccttgttcctggaaggaagtacgtgctgtgggtggtaactcacagtggagatctcagcaataaagtcacagcggagagcagaacagctccaagtcctcccagtcttatgtcatttgctgacattgcaaacacatccttggccatcacgtggaaagggcccccagactggacagactacaacgactttgagctgcagtggttgcccagagatgcacttactgtcttcaacccctacaacaacagaaaatcagaaggacgcattgtgtatggtcttcgtccagggagatcctatcaattcaacgtcaagactgtcagtggtgattcctggaaaacttacagcaaaccaatttttggatctgtgaggacaaagcctgacaagatacaaaacctgcattgccggcctcagaactccacggccattgcctgttcttggatccctcctgattctgactttgatggttatagtattgaatgccggaaaatggacacccaagaagttgagttttccagaaagctggagaaagaaaaatctctgctcaacatcatgatgctagtgccccataagaggtacctggtgtccatcaaagtgcagtcggccggcatgaccagcgaggtggttgaagacagcactatcacaatgatagaccgcccccctcctccacccccacacattcgtgtgaatgaaaaggatgtgctaattagcaagtcttccatcaactttactgtcaactgcagctggttcagcgacaccaatggagctgtgaaatacttcacagtggtggtgagagaggctgatggcagtgatgagctgaagccagaacagcagcaccctctcccttcctacctggagtacaggcacaatgcctccattcgggtgtatcagactaattattttgccagcaaatgtgccgaaaatcctaacagcaactccaagagttttaacattaagcttggagcagagatggagagcctaggtggaaaatgcgatcccactcagcaaaaattctgtgatggaccactgaagccacacactgcctacagaatcagcattcgagcttttacacagctctttgatgaggacctgaaggaattcacaaagccactctattcagacacatttttttctttacccatcactactgaatcagagcccttgtttggagctattgaaggtgtgagtgctggtctgtttttaattggcatgctagtggctgttgttgccttattgatctgcagacagaaagtgagccatggtcgagaaagaccctctgcccgtctgagcattcgtagggatcgaccattatctgtccacttaaacctgggccagaaaggtaaccggaaaacttcttgtccaataaaaataaatcagtttgaagggcatttcatgaagctacaggctgactccaactaccttctatccaaggaatacgaggagttaaaagacgtgggccgaaaccagtcatgtgacattgcactcttgccggagaatagagggaaaaatcgatacaacaatatattgccctatgatgccacgcgagtgaagctctccaatgtagatgatgatccttgctctgactacatcaatgccagctacatccctggcaacaacttcagaagagaatacattgtcactcagggaccgcttcctggcaccaaggatgacttctggaaaatggtgtgggaacaaaacgttcacaacatcgtcatggtgacccagtgtgttgagaagggccgagtaaagtgtgatcattactggccagcggaccaggattccctctactatggggacctcatcctgcagatgctctcagagtccgtcctgcctgagtggaccatccgggagtttaagatatgcggtgaggaacagcttgatgcacacagactcatccgccactttcactatacggtgtggccagaccatggagtcccagaaaccacccagtctctgatccagtttgtgagaactgtcagggactacatcaacagaagcccgggtgctgggcccactgtggtgcactgcagtgctggtgtgggtaggactggaacctttattgcattggaccgaatcctccagcagttagactccaaagactctgtggacatttatggagcagtgcacgacctaagacttcacagggttcacatggtccagactgagtgtcagtatgtctacctacatcagtgtgtaagagatgtcctcagagcaagaaagctacggagtgaacaagaaaaccccttgtttccaatctatgaaaatgtgaatccagagtatcacagagatccagtctattcaaggcattgagaatgtacctgaagagctcctggataaaaattattcactgtgtgatttgtttttaaaaacttgcttcatgccctacagaggtgccagctatttctgttgatactatgtataatttattaatctggagaatgtttaaaattttatataatttaaaggtaacagatattattgtacatagttgtattttgtagtttcttctgtaaatatgtatttttcataatgtttaatattaagctttatataatactatttttccacactaaagtgttcatgacttgttctacataaaactaattcaacctgtatgacaggactactggtaaaatgcatatggaggtggtggcagagacaatccttcaggccatgttttctacctgttttgatattcactggacaggaaaaagggcagggctagagagagcaaatactatggctagatttgctgcattgctgtcccatgaatctcgagagccaacagacatgtcctaacttgctattaggacaaatgtgacagtcaaaaaaaggattagagggagggagaaaaaagaattaagcagtaccaaagctgaactagatgcttgtgtctgaactagttgctctctctctcctttctccttccagggattcaagccaaagtggtcagctcagggatcatgtaacttgcagtgcaagcccaggatggtaggatgcagggttgagggttctgatagagaatgattccaaacagaagtgatgaattccttttgttaataagatgccagctatacccagactggaaacataacatgcaaagcactatctacagtgattagagatcctttcattgcattcatggtgtggagtgtgaacatccacacccatactgtaatgtatttatacacactagtttctgtctcattttcagtggtctccattcctagaaaagtcacaattatccattcctacttgatttcccattaaaagaatattatggtagcagattgtgcccctcattaaaaggcttaatgccaacattttcatagaaatgactacaaacatcatatatagtaaatttaaaaacaatagcaaaaacaaaaacagtggtcttcagtaaaattttcaaaacttcttttagtaaatcaatgaagtcaaaatgtcaagtaatcacccaaagttgcatttaataacaaaaggcactacatactgtaccaagtttatcttcaatatttgtgccttacttactttgactataacaaattccaatgagtcagaaagtatttccttcatcaaggtccagttccgacagcattcctgggaaaaatttgaaaggagtttgtacggaatcttcatagatacctgagaagatgagctggagatgtttgcctttttcacactacaaatttttctgtaataaacttgggaattagaggtcaagtttgttgatggcatagcttcctttgcataaagagtatatttcttttcaaagtatatatttttgtaacctaccataaagtccgtaagtgaatacaacgaatgtaattgacataataattgaaaatcattgactatacctaaaatagttctttataattaaataactctacacccaatctggaaatttttccaaggttatttgaagtttacaaaaatgtgaagcataatcataagcttcaaagattcacagtttcattgtgctcaatgctcttgtgaaatgacagtcttaagctctgattctgtatcaaggaactaagtgaatcttctggaaatgaaaaggaacaacatatgtgtaagtgcagtagatgtaccaccagcgagaaaatagaggtcagagatctacaacgtgtggcatccattagaaatcacctttcctacattgaaaagaaaaaagagaaaaagcagaattttacactaatgttgcttgatgcaaagcacattaatgcttggaaggatacattcattttcgacttttcattcactcagaaaacttctagtaagtatctgcaacctgctaggcactgttccagaatctacacatttctactcacataaagagaatcctcataaagttaggattgttgttactaccttcaattgagcttaaaagacagcctcatcaagggaatgggataactgagccagtctaggacagtggtcaccttccacaggccacacactggaaagtgctaatgctactttaatagcaaacctctggatctaggagagagagcaattaattgcacaaaccaggagttaaaaccataaaaaaaacctatgcatctgtaatagtaaataacactcacgtactctggcaacatctagggtagtatcagaattatgtaaatggacatgacagggaaaaatcgtaggtttttttagtctaatccaacccaggaaatgtttattcctaccctacacctaattttaaaccttcttagcaacaaatatttcactattcgctcctactcctgggaagactaaatatataattgacttatttattaaatttaggagaaaaaaaaagttttccttgacattcagctctattggatttatttccatttaattgcatcatgtgttatgtcttggtaaacactccatttcctgtcttggtgggcatcctgtctgtgtacctgtgcagtacactttaatcatcaagacttcaaagtgcttttgagctatcaaatcttgggagagtcccatctagcatcttaataattatttttccaagttcgttataattaactcctttaacctcatctcattaaatcaattttgtattgtcattctgttgttctctggaaagcagccaattgttcagctcttgaatcagaattttcaaagactcacctctcttacctgggcttgcacatatttgtcctaagtaattctctatcccttaaacctctgagtccctctgttttattacttgccccactcctcctacttgaatatgtttgttttcccagttgaatgtgatttttatctactgttcatattatcttttatacccatgagtataatttcatagtcctttcaggttccacatcatcaaagagatgaccataatttcacttttttttgaaatgaagtcttgctctgttgcccaggctggagtgcagtggcacaatctcagctcactacaacctccgcctcccaggttcaagcgattctgccttagcctcccaagtagctggaattacaggtgcctgccaccatgtctggctaatttttgtgtttttagtagagatggggtttcaccatgttggccaggctggtcttgaactcgtgaccttaggtgatccacccacctcaacctcccaaagtgctaggattacaagagtgagccaccgcacctggccaattcacttttaaatactaaaaggcacacagcacacagacattttcggggcagttttctttgggagggtctttgataaattttgtaatcacctctcggaagaaagcccaaaatgacatgtgaaaataatattaaaccatttaccagatgtccagcaatataaaaatagacctcacatgctacccttcacatgctgattctcttgccttgctgtttaaggatccagtttcttatgttaaacattttccttaccttttgcaataatattattggccatatactaaattctcattcacttagctttctaagaattctttgaggttggaatcctgaaatcataaagctaccagatctgcacaacagcagtggtagtatctgagcccaaactctgagacgctctagagttttagtttacaaacatgagccagaccaaacctgacctggtgaaaatcaataggtaataaactgcttgtatatgatagcagttcaagggctttctgggttccatttcactgaggaaatgaaaatataactgattagccaagacagagtggcaataaggaataactgatcctcctccaagttgcagtgagcaagccctcaagcctacctcattcctgaagagttgaaggagaaaatgccgtgctaattttctgccctgctatttttaacctgaaatttagaattacatcaggtattcaaagaatgttccctatcaaaggaaaatctgtaaacgatgactgcaaaaagcaagtgaaatgatgcaaagagaaaatatttgcaaaacagaatctaaccagacatcatcatgaagataaaatggcatctcttctgtgtggcctgggtgtgcttggacaatcctgtcacacgtttctattaggacatgttgcccttttgaggattcactctatgttggccagatggtttaactgattaaacaattgaatcaatttattttgctttttgaattgaccagatatttaactaaatgtactgggtttggcattttagacacactgccttagattcttgtagtgcatgatgactttgaaaatgtttggccattttagttaaaatgcagggtaacatttgatgcagccatgataacaggaaaaatctgttctgttctaaaaatgtttctagcaatagaagtatttctggctaagagaatactcttgacttgtagggaggctccctcggaataaatgtatgcaacacaaataaggcattttattttttaaaagattgtctatataagatacacttattaaataaagaaattgttggtgaatgctctgaaaa

SEQ ID NO: 22 - protein, 2215 aa, Homo sapiens
MEAEFYMVILTCLIFRNSEGFQIVHVQKQQCLFKNEKVVVGSCNRTIQNQQWMWTEDEKLLHVKSALCLAISNSSRGPSRSAILDRCSQAPRWTCYDQEGFLEVENASLFLQKQGSRVVVKKARKYLHSWMKIDVNKEGKLVNESLCLQKAGLGAEVSVRSTRNTAPPQILTTFNAVPDGLVFLIRNTTEAFIRNAAENYSQNSSERQHPNLHMTGITDTSWVLSTTQPFSSTTEETGLAEPERCNFTLAESKASSHSVSIQWRILGSPCNFSLIYSSDTLGAALCPTFRIDNTTYGCNLQDLQAGTIYNFRIISLDEERTVVLQTDPLPPARFGVSKEKTTSTSLHVWWTPSSGKVTSYEVQLFDENNQKIQGVQIQESTSWNEYTFFNLTAGSKYNIAITAVSGGKRSFSVYTNGSTVPSPVKDIGISTKANSLLISWSHGSGNVERYRLMLMDKGILVHGGVVDKHATSYAFHGLTPGYLYNLTVMTEAAGLQNYRWKLVRTAPMEVSNLKVTNDGSLTSLKVKWQRPPGNVDSYNITLSHKGTIKESRVLAPWITETHFKELVPGRLYQVTVSCVSGELSAQKMAVGRTFPDKVANLEANNNGRMRSLVVSWSPPAGDWEQYRILLFNDSVVLLNITVGKEETQYVMDDTGLVPGRQYEVEVIVESGNLKNSERCQGRTVPLAVLQLRVKHANETSLSIMWQTPVAEWEKYIISLADRDLLLIHKSLSKDAKEFTFTDLVPGRKYMATVTSISGDLKNSSSVKGRTVPAQVTDLHVANQGMTSSLFTNWTQAQGDVEFYQVLLIHENVVIKNESISSETSRYSFHSLKSGSLYSVVVTTVSGGISSRQVVVEGRTVPSSVSGVTVNNSGRNDYLSVSWLLAPGDVDNYEVTLSHDGKVVQSLVIAKSVRECSFSSLTPGRLYTVTITTRSGKYENHSFSQERTVPDKVQGVSVSNSARSDYLRVSWVHATGDFDHYEVTIKNKNNFIQTKSIPKSENECVFVQLVPGRLYSVTVTTKSGQYEANEQGNGRTIPEPVKDLTLRNRSTEDLHVTWSGANGDVDQYEIQLLFNDMKVFPPFHLVNTATEYRFTSLTPGRQYKILVLTISGDVQQSAFIEGFTVPSAVKNIHISPNGATDSLTVNWTPGGGDVDSYTVSAFRHSQKVDSQTIPKHVFEHTFHRLEAGEQYQIMIASVSGSLKNQINVVGRTVPASVQGVIADNAYSSYSLIVSWQKAAGVAERYDILLLTENGILLRNTSEPATTKQHKFEDLTPGKKYKIQILTVSGGLFSKEAQTEGRTVPAAVTDLRITENSTRHLSFRWTASEGELSWYNIFLYNPDGNLQERAQVDPLVQSFSFQNLLQGRMYKMVIVTHSGELSNESFIFGRTVPASVSHLRGSNRNTTDSLWFNWSPASGDFDFYELILYNPNGTKKENWKDKDLTEWRFQGLVPGRKYVLWVVTHSGDLSNKVTAESRTAPSPPSLMSFADIANTSLAITWKGPPDWTDYNDFELQWLPRDALTVFNPYNNRKSEGRIVYGLRPGRSYQFNVKTVSGDSWKTYSKPIFGSVRTKPDKIQNLHCRPQNSTAIACSWIPPDSDFDGYSIECRKMDTQEVEFSRKLEKEKSLLNIMMLVPHKRYLVSIKVQSAGMTSEVVEDSTITMIDRPPPPPPHIRVNEKDVLISKSSINFTVNCSWFSDTNGAVKYFTVVVREADGSDELKPEQQHPLPSYLEYRHNASIRVYQTNYFASKCAENPNSNSKSFNIKLGAEMESLGGKCDPTQQKFCDGPLKPHTAYRISIRAFTQLFDEDLKEFTKPLYSDTFFSLPITTESEPLFGAIEGVSAGLFLIGMLVAVVALLICRQKVSHGRERPSARLSIRRDRPLSVHLNLGQKGNRKTSCPIKINQFEGHFMKLQADSNYLLSKEYEELKDVGRNQSCDIALLPENRGKNRYNNILPYDATRVKLSNVDDDPCSDYINASYIPGNNFRREYIVTQGPLPGTKDDFWKMVWEQNVHNIVMVTQCVEKGRVKCDHYWPADQDSLYYGDLILQMLSESVLPEWTIREFKICGEEQLDAHRLIRHFHYTVWPDHGVPETTQSLIQFVRTVRDYINRSPGAGPTVVHCSAGVGRTGTFIALDRILQQLDSKDSVDIYGAVHDLRLHRVHMVQTECQYVYLHQCVRDVLRARKLRSEQENPLFPIYENVNPEYHRDPVYSRH

SEQ ID NO: 23 - DNA, 10663 bp, Homo sapiens
  CDS (31)..(6024)
gtctcctctggatcttaactactgagcgcaatgctgagccatggagccgggttggccttgtggatcacactgagcctgctgcagactggactggcggagccagagagatgtaacttcaccctggcggagtccaaggcctccagccattctgtgtctatccagtggagaattttgggctcaccctgtaactttagcctcatctatagcagtgacaccctgggggccgcgttgtgccctacctttcggatagacaacaccacatacggatgtaaccttcaagatttacaagcaggaaccatctataacttcaggattatttctctggatgaagagagaacagtggtcttgcaaacagatcctttacctcctgctaggtttggagtcagtaaagagaagacgacttcaaccagcttgcatgtttggtggactccttcttccggaaaagtcacctcatatgaggtgcaattatttgatgaaaataaccaaaagatacagggggttcaaattcaagaaagtacttcatggaatgaatacacttttttcaatctcactgctggtagtaaatacaatattgccatcacagctgtttctggaggaaaacgttctttttcagtttataccaatggatcaacagtgccatctccagtgaaagatattggtatttccacaaaagccaattctctcctgatttcctggtcccatggttctgggaatgtggaacgataccggctgatgctaatggataaagggatcctagttcatggcggtgttgtggacaaacatgctacttcctatgcttttcacgggctgacccctggctacctctacaacctcactgttatgactgaggctgcagggctgcaaaactacaggtggaaactagtcaggacagcccccatggaagtctcaaatctgaaggtgacaaatgatggcagtttgacctctctaaaagtcaaatggcaaagacctcctggaaatgtggattcttacaatatcaccctgtctcacaaagggaccatcaaggaatccagagtattagcaccttggattactgaaactcactttaaagagttagtccccggtcgactttatcaagttactgtcagctgtgtctctggtgaactgtctgctcagaagatggcagtgggcagaacatttccagacaaagttgcaaacctggaggcaaacaataatggcaggatgaggtctcttgtagtgagctggtcgccccctgctggagactgggagcagtatcggatcctactcttcaatgattctgtggtgctgctcaacatcactgtgggaaaggaagaaacacagtatgtcatggatgacacggggctcgtaccgggaagacagtatgaggtggaagtcattgttgagagtggaaatttgaagaattctgagcgttgccaaggcaggacagtccccctggctgtcctccagcttcgtgtcaaacatgccaatgaaacctcactgagtatcatgtggcagacccctgtagcagaatgggagaaatacatcatttccctagctgacagagacctcttactgatccacaagtcactctccaaagatgccaaagaattcacttttactgacctggtgcctggacgaaaatacatggctacagtcaccagtattagtggagacttaaaaaattcctcttcagtaaaaggaagaacagtgcctgcccaagtgactgacttgcatgtggccaaccaaggaatgaccagtagtctgtttactaactggacccaggcacaaggagacgtagaattttaccaagtcttactgatccatgaaaatgtggtcattaaaaatgaaagcatctccagtgagaccagcagatacagcttccactctctcaagtccggcagcctgtactccgtggtggtaacaacagtgagtggagggatctcttcccgacaagtggttgtggagggaagaacagtcccttccagtgtgagtggagtaacggtgaacaattccggtcgtaatgactacctcagcgtttcctggctgctggcgcccggagatgtggataactatgaggtaacattgtctcatgacggcaaggtggttcagtcccttgtcattgccaagtctgtcagagaatgttccttcagctccctcaccccaggccgcctctacaccgtgaccataactacaaggagtggcaagtatgaaaatcactccttcagccaagagcggacagtgcctgacaaagtccagggagtcagtgttagcaactcagccaggagtgactatttaagggtatcctgggtgcatgccactggagactttgatcactatgaagtcaccattaaaaacaaaaacaacttcattcaaactaaaagcattcccaagtcagaaaacgaatgtgtatttgttcagctagtccctggacggttgtacagtgtcactgttactacaaaaagtggacaatatgaagccaatgaacaagggaatgggagaacaattccagagcctgttaaggatctaacattgcgcaacaggagcactgaggacttgcatgtgacttggtcaggagctaatggggatgtcgaccaatatgagatccagctgctcttcaatgacatgaaagtatttcctccttttcaccttgtaaataccgcaaccgagtatcgatttacttccctaacaccaggccgccaatacaaaattcttgtcttgacgattagcggggatgtacagcagtcagccttcattgagggcttcacagttcctagtgctgtcaaaaatattcacatttctcccaatggagcaacagatagcctgacggtgaactggactcctggtgggggagacgttgattcctacacggtgtcggcattcaggcacagtcaaaaggttgactctcagactattcccaagcacgtctttgagcacacgttccacagactggaggccggggagcagtaccagatcatgattgcctcagtcagcgggtccctgaagaatcagataaatgtggttgggcggacagttccagcatctgtccaaggagtaattgcagacaatgcatacagcagttattccttaatagtaagttggcaaaaagctgctggtgtggcagaaagatatgatatcctgcttctaactgaaaatggaatccttctgcgcaacacatcagagccagccaccactaagcaacacaaatttgaagatctaacaccaggcaagaaatacaagatacagatcctaactgtcagtggaggcctctttagcaaggaagcccagactgaaggccgaacagtcccagcagctgtcaccgacctgaggatcacagagaactccaccaggcacctgtccttccgctggaccgcctcagagggggagctcagctggtacaacatctttttgtacaacccagatgggaatctccaggagagagctcaagttgacccactagtccagagcttctctttccagaacttgctacaaggcagaatgtacaagatggtgattgtaactcacagtggggagctgtctaatgagtctttcatatttggtagaacagtcccagcctctgtgagtcatctcagggggtccaatcggaacacgacagacagcctttggttcaactggagtccagcctctggggactttgacttttatgagctgattctctataatcccaatggcacaaagaaggaaaactggaaagacaaggacctgacggagtggcggtttcaaggccttgttcctggaaggaagtacgtgctgtgggtggtaactcacagtggagatctcagcaataaagtcacagcggagagcagaacagctccaagtcctcccagtcttatgtcatttgctgacattgcaaacacatccttggccatcacgtggaaagggcccccagactggacagactacaacgactttgagctgcagtggttgcccagagatgcacttactgtcttcaacccctacaacaacagaaaatcagaaggacgcattgtgtatggtcttcgtccagggagatcctatcaattcaacgtcaagactgtcagtggtgattcctggaaaacttacagcaaaccaatttttggatctgtgaggacaaagcctgacaagatacaaaacctgcattgccggcctcagaactccacggccattgcctgttcttggatccctcctgattctgactttgatggttatagtattgaatgccggaaaatggacacccaagaagttgagttttccagaaagctggagaaagaaaaatctctgctcaacatcatgatgctagtgccccataagaggtacctggtgtccatcaaagtgcagtcggccggcatgaccagcgaggtggttgaagacagcactatcacaatgatagaccgcccccctcctccacccccacacattcgtgtgaatgaaaaggatgtgctaattagcaagtcttccatcaactttactgtcaactgcagctggttcagcgacaccaatggagctgtgaaatacttcacagtggtggtgagagaggctgatggcagtgatgagctgaagccagaacagcagcaccctctcccttcctacctggagtacaggcacaatgcctccattcgggtgtatcagactaattattttgccagcaaatgtgccgaaaatcctaacagcaactccaagagttttaacattaagcttggagcagagatggagagcctaggtggaaaatgcgatcccactcagcaaaaattctgtgatggaccactgaagccacacactgcctacagaatcagcattcgagcttttacacagctctttgatgaggacctgaaggaattcacaaagccactctattcagacacatttttttctttacccatcactactgaatcagagcccttgtttggagctattgaaggtgtgagtgctggtctgtttttaattggcatgctagtggctgttgttgccttattgatctgcagacagaaagtgagccatggtcgagaaagaccctctgcccgtctgagcattcgtagggatcgaccattatctgtccacttaaacctgggccagaaaggtaaccggaaaacttcttgtccaataaaaataaatcagtttgaagggcatttcatgaagctacaggctgactccaactaccttctatccaaggaatacgaggagttaaaagacgtgggccgaaaccagtcatgtgacattgcactcttgccggagaatagagggaaaaatcgatacaacaatatattgccctatgatgccacgcgagtgaagctctccaatgtagatgatgatccttgctctgactacatcaatgccagctacatccctggcaacaacttcagaagagaatacattgtcactcagggaccgcttcctggcaccaaggatgacttctggaaaatggtgtgggaacaaaacgttcacaacatcgtcatggtgacccagtgtgttgagaagggccgagtaaagtgtgatcattactggccagcggaccaggattccctctactatggggacctcatcctgcagatgctctcagagtccgtcctgcctgagtggaccatccgggagtttaagatatgcggtgaggaacagcttgatgcacacagactcatccgccactttcactatacggtgtggccagaccatggagtcccagaaaccacccagtctctgatccagtttgtgagaactgtcagggactacatcaacagaagcccgggtgctgggcccactgtggtgcactgcagtgctggtgtgggtaggactggaacctttattgcattggaccgaatcctccagcagttagactccaaagactctgtggacatttatggagcagtgcacgacctaagacttcacagggttcacatggtccagactgagtgtcagtatgtctacctacatcagtgtgtaagagatgtcctcagagcaagaaagctacggagtgaacaagaaaaccccttgtttccaatctatgaaaatgtgaatccagagtatcacagagatccagtctattcaaggcattgagaatgtacctgaagagctcctggataaaaattattcactgtgtgatttgtttttaaaaacttgcttcatgccctacagaggtgccagctatttctgttgatactatgtataatttattaatctggagaatgtttaaaattttatataatttaaaggtaacagatattattgtacatagttgtattttgtagtttcttctgtaaatatgtatttttcataatgtttaatattaagctttatataatactatttttccacactaaagtgttcatgacttgttctacataaaactaattcaacctgtatgacaggactactggtaaaatgcatatggaggtggtggcagagacaatccttcaggccatgttttctacctgttttgatattcactggacaggaaaaagggcagggctagagagagcaaatactatggctagatttgctgcattgctgtcccatgaatctcgagagccaacagacatgtcctaacttgctattaggacaaatgtgacagtcaaaaaaaggattagagggagggagaaaaaagaattaagcagtaccaaagctgaactagatgcttgtgtctgaactagttgctctctctctcctttctccttccagggattcaagccaaagtggtcagctcagggatcatgtaacttgcagtgcaagcccaggatggtaggatgcagggttgagggttctgatagagaatgattccaaacagaagtgatgaattccttttgttaataagatgccagctatacccagactggaaacataacatgcaaagcactatctacagtgattagagatcctttcattgcattcatggtgtggagtgtgaacatccacacccatactgtaatgtatttatacacactagtttctgtctcattttcagtggtctccattcctagaaaagtcacaattatccattcctacttgatttcccattaaaagaatattatggtagcagattgtgcccctcattaaaaggcttaatgccaacattttcatagaaatgactacaaacatcatatatagtaaatttaaaaacaatagcaaaaacaaaaacagtggtcttcagtaaaattttcaaaacttcttttagtaaatcaatgaagtcaaaatgtcaagtaatcacccaaagttgcatttaataacaaaaggcactacatactgtaccaagtttatcttcaatatttgtgccttacttactttgactataacaaattccaatgagtcagaaagtatttccttcatcaaggtccagttccgacagcattcctgggaaaaatttgaaaggagtttgtacggaatcttcatagatacctgagaagatgagctggagatgtttgcctttttcacactacaaatttttctgtaataaacttgggaattagaggtcaagtttgttgatggcatagcttcctttgcataaagagtatatttcttttcaaagtatatatttttgtaacctaccataaagtccgtaagtgaatacaacgaatgtaattgacataataattgaaaatcattgactatacctaaaatagttctttataattaaataactctacacccaatctggaaatttttccaaggttatttgaagtttacaaaaatgtgaagcataatcataagcttcaaagattcacagtttcattgtgctcaatgctcttgtgaaatgacagtcttaagctctgattctgtatcaaggaactaagtgaatcttctggaaatgaaaaggaacaacatatgtgtaagtgcagtagatgtaccaccagcgagaaaatagaggtcagagatctacaacgtgtggcatccattagaaatcacctttcctacattgaaaagaaaaaagagaaaaagcagaattttacactaatgttgcttgatgcaaagcacattaatgcttggaaggatacattcattttcgacttttcattcactcagaaaacttctagtaagtatctgcaacctgctaggcactgttccagaatctacacatttctactcacataaagagaatcctcataaagttaggattgttgttactaccttcaattgagcttaaaagacagcctcatcaagggaatgggataactgagccagtctaggacagtggtcaccttccacaggccacacactggaaagtgctaatgctactttaatagcaaacctctggatctaggagagagagcaattaattgcacaaaccaggagttaaaaccataaaaaaaacctatgcatctgtaatagtaaataacactcacgtactctggcaacatctagggtagtatcagaattatgtaaatggacatgacagggaaaaatcgtaggtttttttagtctaatccaacccaggaaatgtttattcctaccctacacctaattttaaaccttcttagcaacaaatatttcactattcgctcctactcctgggaagactaaatatataattgacttatttattaaatttaggagaaaaaaaaagttttccttgacattcagctctattggatttatttccatttaattgcatcatgtgttatgtcttggtaaacactccatttcctgtcttggtgggcatcctgtctgtgtacctgtgcagtacactttaatcatcaagacttcaaagtgcttttgagctatcaaatcttgggagagtcccatctagcatcttaataattatttttccaagttcgttataattaactcctttaacctcatctcattaaatcaattttgtattgtcattctgttgttctctggaaagcagccaattgttcagctcttgaatcagaattttcaaagactcacctctcttacctgggcttgcacatatttgtcctaagtaattctctatcccttaaacctctgagtccctctgttttattacttgccccactcctcctacttgaatatgtttgttttcccagttgaatgtgatttttatctactgttcatattatcttttatacccatgagtataatttcatagtcctttcaggttccacatcatcaaagagatgaccataatttcacttttttttgaaatgaagtcttgctctgttgcccaggctggagtgcagtggcacaatctcagctcactacaacctccgcctcccaggttcaagcgattctgccttagcctcccaagtagctggaattacaggtgcctgccaccatgtctggctaatttttgtgtttttagtagagatggggtttcaccatgttggccaggctggtcttgaactcgtgaccttaggtgatccacccacctcaacctcccaaagtgctaggattacaagagtgagccaccgcacctggccaattcacttttaaatactaaaaggcacacagcacacagacattttcggggcagttttctttgggagggtctttgataaattttgtaatcacctctcggaagaaagcccaaaatgacatgtgaaaataatattaaaccatttaccagatgtccagcaatataaaaatagacctcacatgctacccttcacatgctgattctcttgccttgctgtttaaggatccagtttcttatgttaaacattttccttaccttttgcaataatattattggccatatactaaattctcattcacttagctttctaagaattctttgaggttggaatcctgaaatcataaagctaccagatctgcacaacagcagtggtagtatctgagcccaaactctgagacgctctagagttttagtttacaaacatgagccagaccaaacctgacctggtgaaaatcaataggtaataaactgcttgtatatgatagcagttcaagggctttctgggttccatttcactgaggaaatgaaaatataactgattagccaagacagagtggcaataaggaataactgatcctcctccaagttgcagtgagcaagccctcaagcctacctcattcctgaagagttgaaggagaaaatgccgtgctaattttctgccctgctatttttaacctgaaatttagaattacatcaggtattcaaagaatgttccctatcaaaggaaaatctgtaaacgatgactgcaaaaagcaagtgaaatgatgcaaagagaaaatatttgcaaaacagaatctaaccagacatcatcatgaagataaaatggcatctcttctgtgtggcctgggtgtgcttggacaatcctgtcacacgtttctattaggacatgttgcccttttgaggattcactctatgttggccagatggtttaactgattaaacaattgaatcaatttattttgctttttgaattgaccagatatttaactaaatgtactgggtttggcattttagacacactgccttagattcttgtagtgcatgatgactttgaaaatgtttggccattttagttaaaatgcagggtaacatttgatgcagccatgataacaggaaaaatctgttctgttctaaaaatgtttctagcaatagaagtatttctggctaagagaatactcttgacttgtagggaggctccctcggaataaatgtatgcaacacaaataaggcattttattttttaaaagattgtctatataagatacacttattaaataaagaaattgttggtgaatgctctgaaaa

SEQ ID NO: 24 - protein, 1997 aa, Homo sapiens
MLSHGAGLALWITLSLLQTGLAEPERCNFTLAESKASSHSVSIQWRILGSPCNFSLIYSSDTLGAALCPTFRIDNTTYGCNLQDLQAGTIYNFRIISLDEERTVVLQTDPLPPARFGVSKEKTTSTSLHVWWTPSSGKVTSYEVQLFDENNQKIQGVQIQESTSWNEYTFFNLTAGSKYNIAITAVSGGKRSFSVYTNGSTVPSPVKDIGISTKANSLLISWSHGSGNVERYRLMLMDKGILVHGGVVDKHATSYAFHGLTPGYLYNLTVMTEAAGLQNYRWKLVRTAPMEVSNLKVTNDGSLTSLKVKWQRPPGNVDSYNITLSHKGTIKESRVLAPWITETHFKELVPGRLYQVTVSCVSGELSAQKMAVGRTFPDKVANLEANNNGRMRSLVVSWSPPAGDWEQYRILLFNDSVVLLNITVGKEETQYVMDDTGLVPGRQYEVEVIVESGNLKNSERCQGRTVPLAVLQLRVKHANETSLSIMWQTPVAEWEKYIISLADRDLLLIHKSLSKDAKEFTFTDLVPGRKYMATVTSISGDLKNSSSVKGRTVPAQVTDLHVANQGMTSSLFTNWTQAQGDVEFYQVLLIHENVVIKNESISSETSRYSFHSLKSGSLYSVVVTTVSGGISSRQVVVEGRTVPSSVSGVTVNNSGRNDYLSVSWLLAPGDVDNYEVTLSHDGKVVQSLVIAKSVRECSFSSLTPGRLYTVTITTRSGKYENHSFSQERTVPDKVQGVSVSNSARSDYLRVSWVHATGDFDHYEVTIKNKNNFIQTKSIPKSENECVFVQLVPGRLYSVTVTTKSGQYEANEQGNGRTIPEPVKDLTLRNRSTEDLHVTWSGANGDVDQYEIQLLFNDMKVFPPFHLVNTATEYRFTSLTPGRQYKILVLTISGDVQQSAFIEGFTVPSAVKNIHISPNGATDSLTVNWTPGGGDVDSYTVSAFRHSQKVDSQTIPKHVFEHTFHRLEAGEQYQIMIASVSGSLKNQINVVGRTVPASVQGVIADNAYSSYSLIVSWQKAAGVAERYDILLLTENGILLRNTSEPATTKQHKFEDLTPGKKYKIQILTVSGGLFSKEAQTEGRTVPAAVTDLRITENSTRHLSFRWTASEGELSWYNIFLYNPDGNLQERAQVDPLVQSFSFQNLLQGRMYKMVIVTHSGELSNESFIFGRTVPASVSHLRGSNRNTTDSLWFNWSPASGDFDFYELILYNPNGTKKENWKDKDLTEWRFQGLVPGRKYVLWVVTHSGDLSNKVTAESRTAPSPPSLMSFADIANTSLAITWKGPPDWTDYNDFELQWLPRDALTVFNPYNNRKSEGRIVYGLRPGRSYQFNVKTVSGDSWKTYSKPIFGSVRTKPDKIQNLHCRPQNSTAIACSWIPPDSDFDGYSIECRKMDTQEVEFSRKLEKEKSLLNIMMLVPHKRYLVSIKVQSAGMTSEVVEDSTITMIDRPPPPPPHIRVNEKDVLISKSSINFTVNCSWFSDTNGAVKYFTVVVREADGSDELKPEQQHPLPSYLEYRHNASIRVYQTNYFASKCAENPNSNSKSFNIKLGAEMESLGGKCDPTQQKFCDGPLKPHTAYRISIRAFTQLFDEDLKEFTKPLYSDTFFSLPITTESEPLFGAIEGVSAGLFLIGMLVAVVALLICRQKVSHGRERPSARLSIRRDRPLSVHLNLGQKGNRKTSCPIKINQFEGHFMKLQADSNYLLSKEYEELKDVGRNQSCDIALLPENRGKNRYNNILPYDATRVKLSNVDDDPCSDYINASYIPGNNFRREYIVTQGPLPGTKDDFWKMVWEQNVHNIVMVTQCVEKGRVKCDHYWPADQDSLYYGDLILQMLSESVLPEWTIREFKICGEEQLDAHRLIRHFHYTVWPDHGVPETTQSLIQFVRTVRDYINRSPGAGPTVVHCSAGVGRTGTFIALDRILQQLDSKDSVDIYGAVHDLRLHRVHMVQTECQYVYLHQCVRDVLRARKLRSEQENPLFPIYENVNPEYHRDPVYSRH

SEQ ID NO: 25 - DNA, 2234 bp, Homo sapiens
  CDS (649)..(1662)
gttgactggaggcggaggttgcagtgagccgagatcgccccactgcactccagcctggtgactccgtctcaaaaaaaaggggaggggggcgggggagagttgaaagcttaatatgtactttgggggctattaaagcaaacatttcgactaaaggggcgaatcctcgaattgtgcgatcaagcacccgagaggagagttggggggggtcaggaggggtgggggctccagggaaagcccgggggtctgggccggggtctcgcggggcccttccggaaggatcgcggcccccgaaggtgggcgtcccgcggggctccagtctccaggacgttccgggaggctccgcgctctgggaggccggctgcgtggggtccccgcgctgcagccgcagaggccccccagggccgcggttcccggagcgggaaagtcccgcgcgggggcggtggcctcgggggcgggacggggcgggggcgggggcgcgggcggccgagccgaatcccctccaccgggacgccccgctgctgctcgggaagaggcgggccctgcgcgccctgcgctcgccatggcggtttgggcggcgacgtgagcggctccgcggaccccgagcggggccccggccgcgacctgagccgccgccgagcgcccggggccatgcgaccgacgctgctgtggtcgctgctgctgctgctcggagtcttcgccgccgccgccgcggccccgccagaccctctttcccagctgcccgctcctcagcacccgaagattcgcctgtacaacgcagagcaggtcctgagttgggagccagtggccctgagcaatagcacgaggcctgttgtctaccaagtgcagtttaaatacaccgacagtaaatggttcacggccgacatcatgtccataggggtgaattgtacacagatcacagcaacagagtgtgacttcactgccgccagtccctcagcaggcttcccaatggatttcaatgtcactctacgccttcgagctgagctgggagcactccattctgcctgggtgacaatgccttggtttcaacactatcggaatgtgactgtcgggcctccagaaaacattgaggtgaccccaggagaaggctccctcatcatcaggttctcctctccctttgacatcgctgatacctccacggcctttttttgttattatgtccattactgggaaaaaggaggaatccaacaggtcaaaggccctttcagaagcaactccatttcattggataacttaaaaccctccagagtgtactgtttacaagtccaggcacaactgctttggaacaaaagtaacatctttagagtcgggcatttaagcaacatatcttgctacgaaacaatggcagatgcctccactgagcttcagcaagtcatcctgatctccgtgggaacattttcgttgctgtcggtgctggcaggagcctgtttcttcctggtcctgaaatatagaggcctgattaaatactggtttcacactccaccaagcatcccattacagatagaagagtatttaaaagacccaactcagcccatcttagaggccttggacaaggacagctcaccaaaggatgacgtctgggactctgtgtccattatctcgtttccggaaaaggagcaagaagatgttctccaaacgctttgaaccaaagcatgggcctagcccactggctccctggaagagatcaagccatcggagctgctagagttctgtctggactttccagagaccagtattcccttttgctgcctctaaaaggcctgtccctgcagacatgagagacagcaggtctcatgggggtgacaagctttttttttttttcttaaagaattttcaaaatcaaattccagaatgattttacggagatatcccaggaaaattaaggcttctcttaaacactaaaaaggcatgtaattgcttgttagcaaaatggatatgacacatctctgatacttttttcattattggttgggctgagcagtcagaagacctggtcgtcgtcttgactttggcaaatgagccggagccccttgggcaggtcacacaacctgtcccagcgagggacaccgagtggcccttcatgtacatccatggtgtgctggcttaaaatgtaattaatcttgtaaatatactcctagtaatttaagattttgtttttaaactggaaataaaagattgtatagtgcatgttttttaaagtctaaaaaaaaaaaaaa

SEQ ID NO: 26 - protein, 337 aa, Homo sapiens
MRPTLLWSLLLLLGVFAAAAAAPPDPLSQLPAPQHPKIRLYNAEQVLSWEPVALSNSTRPVVYQVQFKYTDSKWFTADIMSIGVNCTQITATECDFTAASPSAGFPMDFNVTLRLRAELGALHSAWVTMPWFQHYRNVTVGPPENIEVTPGEGSLIIRFSSPFDIADTSTAFFCYYVHYWEKGGIQQVKGPFRSNSISLDNLKPSRVYCLQVQAQLLWNKSNIFRVGHLSNISCYETMADASTELQQVILISVGTFSLLSVLAGACFFLVLKYRGLIKYWFHTPPSIPLQIEEYLKDPTQPILEALDKDSSPKDDVWDSVSIISFPEKEQEDVLQTL

SEQ ID NO: 27 - DNA, 2205 bp, Homo sapiens
  CDS (329)..(1720)
cctgggtgcaaccagtcacagctctgcagaggttactgtgattttgcccctgaaggatctgtccacaacttaggaactcacacagcttttggcctgagcccccgttaccaagagaaaggaggtttttgccaaggactccaaggggagtgcacttgatgctggtcgggacccaaagcgcccagccctccctgagacattgtgtgagtcgggctgggcctcaaacacggcccccactgccccaccccagccagggtggtgcttgtgtgggaaggactttaaatccagctgccagacccctggacgggagaaggagagacggctggccaccatgcacggctcctgcagtttcctgatgcttctgctgccgctactgctactgctggtggccaccacaggccccgttggagccctcacagatgaggagaaacgtttgatggtggagctgcacaacctctaccgggcccaggtatccccgacggcctcagacatgctgcacatgagatgggacgaggagctggccgccttcgccaaggcctacgcacggcagtgcgtgtggggccacaacaaggagcgcgggcgccgcggcgagaatctgttcgccatcacagacgagggcatggacgtgccgctggccatggaggagtggcaccacgagcgtgagcactacaacctcagcgccgccacctgcagcccaggccagatgtgcggccactacacgcaggtggtatgggccaagacagagaggatcggctgtggttcccacttctgtgagaagctccagggtgttgaggagaccaacatcgaattactggtgtgcaactatgagcctccggggaacgtgaaggggaaacggccctaccaggaggggactccgtgctcccaatgtccctctggctaccactgcaagaactccctctgtgaacccatcggaagcccggaagatgctcaggatttgccttacctggtaactgaggccccatccttccgggcgactgaagcatcagactctaggaaaatgggtactccttcttccctagcaacggggattccggctttcttggtaacagaggtctcaggctccctggcaaccaaggctctgcctgctgtggaaacccaggccccaacttccttagcaacgaaagacccgccctccatggcaacagaggctccaccttgcgtaacaactgaggtcccttccattttggcagctcacagcctgccctccttggatgaggagccagttaccttccccaaatcgacccatgttcctatcccaaaatcagcagacaaagtgacagacaaaacaaaagtgccctctaggagcccagagaactctctggaccccaagatgtccctgacaggggcaagggaactcctaccccatgcccaggaggaggctgaggctgaggctgagttgcctccttccagtgaggtcttggcctcagtttttccagcccaggacaagccaggtgagctgcaggccacactggaccacacggggcacacctcctccaagtccctgcccaatttccccaatacctctgccaccgctaatgccacgggtgggcgtgccctggctctgcagtcgtccttgccaggtgcagagggccctgacaagcctagcgtcgtgtcagggctgaactcgggccctggtcatgtgtggggccctctcctgggactactgctcctgcctcctctggtgttggctggaatcttctgaaggggataccactcaaagggtgaagaggtcagctgtcctcctgtcatcttccccaccctgtccccagcccctaaacaagatacttcttggttaaggccctccggaagggaaaggctacggggcatgtgcctcatcacaccatccatcctggaggcacaaggcctggctggctgcgagctcaggaggccgcctgaggactgcacaccgggcccacacctctcctgcccctccctcctgagtcctgggggtgggaggatttgagggagctcactgcctacctggcctggggctgtctgcccacacagcatgtgcgctctccctgagtgcctgtgtagctggggatggggattcctaggggcagatgaaggacaagccccactggagtggggttctttgagtgggggaggcagggacgagggaaggaaagtaactcctgactctccaataaaaacctgtccaacctgtggcaaaaaaaaaaaaaaaaa

SEQ ID NO: 28 - protein, 463 aa, Homo sapiens
MHGSCSFLMLLLPLLLLLVATTGPVGALTDEEKRLMVELHNLYRAQVSPTASDMLHMRWDEELAAFAKAYARQCVWGHNKERGRRGENLFAITDEGMDVPLAMEEWHHEREHYNLSAATCSPGQMCGHYTQVVWAKTERIGCGSHFCEKLQGVEETNIELLVCNYEPPGNVKGKRPYQEGTPCSQCPSGYHCKNSLCEPIGSPEDAQDLPYLVTEAPSFRATEASDSRKMGTPSSLATGIPAFLVTEVSGSLATKALPAVETQAPTSLATKDPPSMATEAPPCVTTEVPSILAAHSLPSLDEEPVTFPKSTHVPIPKSADKVTDKTKVPSRSPENSLDPKMSLTGARELLPHAQEEAEAEAELPPSSEVLASVFPAQDKPGELQATLDHTGHTSSKSLPNFPNTSATANATGGRALALQSSLPGAEGPDKPSVVSGLNSGPGHVWGPLLGLLLLPPLVLAGIF

SEQ ID NO: 29 - DNA, 1466 bp, Homo sapiens
  CDS (41)..(1135)
tctgctcacacaggaagccctggaagctgcttcctcagacatgccgctgctgctactgctgcccctgctgtgggcaggggccctggctatggatccaaatttctggctgcaagtgcaggagtcagtgacggtacaggagggtttgtgcgtcctcgtgccctgcactttcttccatcccataccctactacgacaagaactccccagttcatggttactggttccgggaaggagccattatatccagggactctccagtggccacaaacaagctagatcaagaagtacaggaggagactcagggcagattccgcctccttggggatcccagtaggaacaactgctccctgagcatcgtagacgccaggaggagggataatggttcatacttctttcggatggagagaggaagtaccaaatacagttacaaatctccccagctctctgtgcatgtgacagacttgacccacaggcccaaaatcctcatccctggcactctagaacccggccactccaaaaacctgacctgctctgtgtcctgggcctgtgagcagggaacacccccgatcttctcctggttgtcagctgcccccacctccctgggccccaggactactcactcctcggtgctcataatcaccccacggccccaggaccacggcaccaacctgacctgtcaggtgaagttcgctggagctggtgtgactacggagagaaccatccagctcaacgtcacctatgttccacagaacccaacaactggtatctttccaggagatggctcagggaaacaagagaccagagcaggagtggttcatggggccattggaggagctggtgttacagccctgctcgctctttgtctctgcctcatcttcttcatagtgaagacccacaggaggaaagcagccaggacagcagtgggcaggaatgacacccaccctaccacagggtcagcctccccgaaacaccagaagaagtccaagttacatggccccactgaaacctcaagctgttcaggtgccgcccctactgtggagatggatgaggagctgcattatgcttccctcaactttcatgggatgaatccttccaaggacacctccaccgaatactcagaggtcaggacccagtgaggaacccacaagagcatcaggctcagctagaagatccacatcctctacaggtcggggaccaaaggctgattcttggagatttaacaccccacaggcaatgggtttatagacattatgtgagtttcctgctatattaacatcatcttagactttgcaagcagagagtcgtggaatcaaatctgtgctctttcatttgctaagtgtatgatgtcacacaagctccttaaccttccatgtctccattttcttctctgtgaagtaggtataagaagtcctatctcatagggatgctgtgagcattaaataaaggtacacatggaaaacaccagtc

SEQ ID NO: 30 - protein, 364 aa, Homo sapiens
MPLLLLLPLLWAGALAMDPNFWLQVQESVTVQEGLCVLVPCTFFHPIPYYDKNSPVHGYWFREGAIISRDSPVATNKLDQEVQEETQGRFRLLGDPSRNNCSLSIVDARRRDNGSYFFRMERGSTKYSYKSPQLSVHVTDLTHRPKILIPGTLEPGHSKNLTCSVSWACEQGTPPIFSWLSAAPTSLGPRTTHSSVLIITPRPQDHGTNLTCQVKFAGAGVTTERTIQLNVTYVPQNPTTGIFPGDGSGKQETRAGVVHGAIGGAGVTALLALCLCLIFFIVKTHRRKAARTAVGRNDTHPTTGSASPKHQKKSKLHGPTETSSCSGAAPTVEMDEELHYASLNFHGMNPSKDTSTEYSEVRTQ

SEQ ID NO: 31 - DNA, 1085 bp, Homo sapiens
  CDS (41)..(754)
tctgctcacacaggaagccctggaagctgcttcctcagacatgccgctgctgctactgctgcccctgctgtgggcagacttgacccacaggcccaaaatcctcatccctggcactctagaacccggccactccaaaaacctgacctgctctgtgtcctgggcctgtgagcagggaacacccccgatcttctcctggttgtcagctgcccccacctccctgggccccaggactactcactcctcggtgctcataatcaccccacggccccaggaccacggcaccaacctgacctgtcaggtgaagttcgctggagctggtgtgactacggagagaaccatccagctcaacgtcacctatgttccacagaacccaacaactggtatctttccaggagatggctcagggaaacaagagaccagagcaggagtggttcatggggccattggaggagctggtgttacagccctgctcgctctttgtctctgcctcatcttcttcatagtgaagacccacaggaggaaagcagccaggacagcagtgggcaggaatgacacccaccctaccacagggtcagcctccccgaaacaccagaagaagtccaagttacatggccccactgaaacctcaagctgttcaggtgccgcccctactgtggagatggatgaggagctgcattatgcttccctcaactttcatgggatgaatccttccaaggacacctccaccgaatactcagaggtcaggacccagtgaggaacccacaagagcatcaggctcagctagaagatccacatcctctacaggtcggggaccaaaggctgattcttggagatttaacaccccacaggcaatgggtttatagacattatgtgagtttcctgctatattaacatcatcttagactttgcaagcagagagtcgtggaatcaaatctgtgctctttcatttgctaagtgtatgatgtcacacaagctccttaaccttccatgtctccattttcttctctgtgaagtaggtataagaagtcctatctcatagggatgctgtgagcattaaataaaggtacacatggaaaacaccagtc

SEQ ID NO: 32 - protein, 237 aa, Homo sapiens
MPLLLLLPLLWADLTHRPKILIPGTLEPGHSKNLTCSVSWACEQGTPPIFSWLSAAPTSLGPRTTHSSVLIITPRPQDHGTNLTCQVKFAGAGVTTERTIQLNVTYVPQNPTTGIFPGDGSGKQETRAGVVHGAIGGAGVTALLALCLCLIFFIVKTHRRKAARTAVGRNDTHPTTGSASPKHQKKSKLHGPTETSSCSGAAPTVEMDEELHYASLNFHGMNPSKDTSTEYSEVRTQ

SEQ ID NO: 33 - DNA, 3332 bp, Homo sapiens
  CDS (30)..(1970)
acttggctctcgccctccggccgggaagcatggggcttcccaggctggtctgcgccttcttgctcgccgcctgctgctgctgtcctcgcgtcgcgggtgtgcccggagaggctgagcagcctgcgcctgagctggtggaggtggaagtgggcagcacagcccttctgaagtgcggcctctcccagtcccaaggcaacctcagccatgtcgactggttttctgtccacaaggagaagcggacgctcatcttccgtgtgcgccagggccagggccagagcgaacctggggagtacgagcagcggctcagcctccaggacagaggggctactctggccctgactcaagtcaccccccaagacgagcgcatcttcttgtgccagggcaagcgccctcggtcccaggagtaccgcatccagctccgcgtctacaaagctccggaggagccaaacatccaggtcaaccccctgggcatccctgtgaacagtaaggagcctgaggaggtcgctacctgtgtagggaggaacgggtaccccattcctcaagtcatctggtacaagaatggccggcctctgaaggaggagaagaaccgggtccacattcagtcgtcccagactgtggagtcgagtggtttgtacaccttgcagagtattctgaaggcacagctggttaaagaagacaaagatgcccagttttactgtgagctcaactaccggctgcccagtgggaaccacatgaaggagtccagggaagtcaccgtccctgttttctacccgacagaaaaagtgtggctggaagtggagcccgtgggaatgctgaaggaaggggaccgcgtggaaatcaggtgtttggctgatggcaaccctccaccacacttcagcatcagcaagcagaaccccagcaccagggaggcagaggaagagacaaccaacgacaacggggtcctggtgctggagcctgcccggaaggaacacagtgggcgctatgaatgtcagggcctggacttggacaccatgatatcgctgctgagtgaaccacaggaactactggtgaactatgtgtctgacgtccgagtgagtcccgcagcccctgagagacaggaaggcagcagcctcaccctgacctgtgaggcagagagtagccaggacctcgagttccagtggctgagagaagagacaggccaggtgctggaaagggggcctgtgcttcagttgcatgacctgaaacgggaggcaggaggcggctatcgctgcgtggcgtctgtgcccagcatacccggcctgaaccgcacacagctggtcaacgtggccatttttggccccccttggatggcattcaaggagaggaaggtgtgggtgaaagagaatatggtgttgaatctgtcttgtgaagcgtcagggcacccccggcccaccatctcctggaacgtcaacggcacggcaagtgaacaagaccaagatccacagcgagtcctgagcaccctgaatgtcctcgtgaccccggagctgttggagacaggtgttgaatgcacggcctccaacgacctgggcaaaaacaccagcatcctcttcctggagctggtcaatttaaccaccctcacaccagactccaacacaaccactggcctcagcacttccactgccagtcctcataccagagccaacagcacctccacagagagaaagctgccggagccggagagccggggcgtggtcatcgtggctgtgattgtgtgcatcctggtcctggcggtgctgggcgctgtcctctatttcctctataagaagggcaagctgccgtgcaggcgctcagggaagcaggagatcacgctacccccgtctcgtaagagcgaacttgtagttgaagttaagtcagataagctcccagaagagatgggcctcctgcagggcagcagcggtgacaagagggctccgggagaccagggagagaaatacatcgatctgaggcattagccccgaatcacttcagctcccttccctgcctggaccattcccagctccctgctcactcttctctcagccaaagcctccaaagggactagagagaagcctcctgctcccctcgcctgcacaccccctttcagagggccactgggttaggacctgaggacctcacttggccctgcaaggcccgcttttcagggaccagtccaccaccatctcctccacgttgagtgaagctcatcccaagcaaggagccccagtctcccgagcgggtaggagagtttcttgcagaacgtgttttttctttacacacattatggctgtaaatacctggctcctgccagcagctgagctgggtagcctctctgagctggtttcctgccccaaaggctggcttccaccatccaggtgcaccactgaagtgaggacacaccggagccaggcgcctgctcatgttgaagtgcgctgttcacacccgctccggagagcaccccagcagcatccagaagcagctgcagtgttgctgccaccaccctcctgtctgcctcttcaaagtctcctgtgacattttttctttggtcagaagccaggaactggtgtcattccttaaaagatacgtgccggggccaggtgtggtggctcacgcctgtaatcccagcactttgggaggccgaggcgggcggatcacaaagtcaggacgagaccatcctggctaacacggtgaaaccctgtctctactaaaaatacaaaaaaaaattagctaggcgtagtggttggcacctatagtcccagctactcggaaggctgaagcaggagaatggtatgaatccaggaggtggagcttgcagtgagccgagaccgtgccactgcactccagcctgggcaacacagcgagactccgtctcgaggaaaaaaaaagaaaagatacgtgcctgcggtgaggaagctgggcgctgttttcgagttcaggtgaattagcctcaatcccccgtgttcacttggctcccatagccctcttgatggatcacgtaaaactgaaaggcagcggggagcagacaaagatgaggtctacactgtccttcatggggattaaagctatggttatattagcaccaaacttctacaaaccaagctcagggccccaaccctagaagggcccaaatgagagaatggtacttagggatggaaaacgggcctggctagagcttcgggtgtgtgtgtctgtctgtgtgtatgcatacatatgtgtgtatatatggttttgtcaggtgtgtaaatttgcaaattgtttcctttatatatgtatgtatatatatatatgaaaatatatatatatatgaaaaataaagcttaattgtcccagaaatcata

SEQ ID NO: 34 - protein, 646 aa, Homo sapiens
MGLPRLVCAFLLAACCCCPRVAGVPGEAEQPAPELVEVEVGSTALLKCGLSQSQGNLSHVDWFSVHKEKRTLIFRVRQGQGQSEPGEYEQRLSLQDRGATLALTQVTPQDERIFLCQGKRPRSQEYRIQLRVYKAPEEPNIQVNPLGIPVNSKEPEEVATCVGRNGYPIPQVIWYKNGRPLKEEKNRVHIQSSQTVESSGLYTLQSILKAQLVKEDKDAQFYCELNYRLPSGNHMKESREVTVPVFYPTEKVWLEVEPVGMLKEGDRVEIRCLADGNPPPHFSISKQNPSTREAEEETTNDNGVLVLEPARKEHSGRYECQGLDLDTMISLLSEPQELLVNYVSDVRVSPAAPERQEGSSLTLTCEAESSQDLEFQWLREETGQVLERGPVLQLHDLKREAGGGYRCVASVPSIPGLNRTQLVNVAIFGPPWMAFKERKVWVKENMVLNLSCEASGHPRPTISWNVNGTASEQDQDPQRVLSTLNVLVTPELLETGVECTASNDLGKNTSILFLELVNLTTLTPDSNTTTGLSTSTASPHTRANSTSTERKLPEPESRGVVIVAVIVCILVLAVLGAVLYFLYKKGKLPCRRSGKQEITLPPSRKSELVVEVKSDKLPEEMGLLQGSSGDKRAPGDQGEKYIDLRH

SEQ ID NO: 35 - DNA, 4742 bp, Homo sapiens
  CDS (99)..(3557)
ttttctgcccttctttgctttggtggcttccttgtggttcctcagtggtgcctgcaacccctggttcacctccttccaggttctggctccttccagccatggctctcagagtccttctgttaacagccttgaccttatgtcatgggttcaacttggacactgaaaacgcaatgaccttccaagagaacgcaaggggcttcgggcagagcgtggtccagcttcagggatccagggtggtggttggagccccccaggagatagtggctgccaaccaaaggggcagcctctaccagtgcgactacagcacaggctcatgcgagcccatccgcctgcaggtccccgtggaggccgtgaacatgtccctgggcctgtccctggcagccaccaccagcccccctcagctgctggcctgtggtcccaccgtgcaccagacttgcagtgagaacacgtatgtgaaagggctctgcttcctgtttggatccaacctacggcagcagccccagaagttcccagaggccctccgagggtgtcctcaagaggatagtgacattgccttcttgattgatggctctggtagcatcatcccacatgactttcggcggatgaaggagtttgtctcaactgtgatggagcaattaaaaaagtccaaaaccttgttctctttgatgcagtactctgaagaattccggattcactttaccttcaaagagttccagaacaaccctaacccaagatcactggtgaagccaataacgcagctgcttgggcggacacacacggccacgggcatccgcaaagtggtacgagagctgtttaacatcaccaacggagcccgaaagaatgcctttaagatcctagttgtcatcacggatggagaaaagtttggcgatcccttgggatatgaggatgtcatccctgaggcagacagagagggagtcattcgctacgtcattggggtgggagatgccttccgcagtgagaaatcccgccaagagcttaataccatcgcatccaagccgcctcgtgatcacgtgttccaggtgaataactttgaggctctgaagaccattcagaaccagcttcgggagaagatctttgcgatcgagggtactcagacaggaagtagcagctcctttgagcatgagatgtctcaggaaggcttcagcgctgccatcacctctaatggccccttgctgagcactgtggggagctatgactgggctggtggagtctttctatatacatcaaaggagaaaagcaccttcatcaacatgaccagagtggattcagacatgaatgatgcttacttgggttatgctgccgccatcatcttacggaaccgggtgcaaagcctggttctgggggcacctcgatatcagcacatcggcctggtagcgatgttcaggcagaacactggcatgtgggagtccaacgctaatgtcaagggcacccagatcggcgcctacttcggggcctccctctgctccgtggacgtggacagcaacggcagcaccgacctggtcctcatcggggccccccattactacgagcagacccgagggggccaggtgtccgtgtgccccttgcccagggggagggctcggtggcagtgtgatgctgttctctacggggagcagggccaaccctggggccgctttggggcagccctaacagtgctgggggacgtaaatggggacaagctgacggacgtggccattggggccccaggagaggaggacaaccggggtgctgtttacctgtttcacggaacctcaggatctggcatcagcccctcccatagccagcggatagcaggctccaagctctctcccaggctccagtattttggtcagtcactgagtgggggccaggacctcacaatggatggactggtagacctgactgtaggagcccaggggcacgtgctgctgctcaggtcccagccagtactgagagtcaaggcaatcatggagttcaatcccagggaagtggcaaggaatgtatttgagtgtaatgatcaggtggtgaaaggcaaggaagccggagaggtcagagtctgcctccatgtccagaagagcacacgggatcggctaagagaaggacagatccagagtgttgtgacttatgacctggctctggactccggccgcccacattcccgcgccgtcttcaatgagacaaagaacagcacacgcagacagacacaggtcttggggctgacccagacttgtgagaccctgaaactacagttgccgaattgcatcgaggacccagtgagccccattgtgctgcgcctgaacttctctctggtgggaacgccattgtctgctttcgggaacctccggccagtgctggcggaggatgctcagagactcttcacagccttgtttccctttgagaagaattgtggcaatgacaacatctgccaggatgacctcagcatcaccttcagtttcatgagcctggactgcctcgtggtgggtgggccccgggagttcaacgtgacagtgactgtgagaaatgatggtgaggactcctacaggacacaggtcaccttcttcttcccgcttgacctgtcctaccggaaggtgtccacgctccagaaccagcgctcacagcgatcctggcgcctggcctgtgagtctgcctcctccaccgaagtgtctggggccttgaagagcaccagctgcagcataaaccaccccatcttcccggaaaactcagaggtcacctttaatatcacgtttgatgtagactctaaggcttcccttggaaacaaactgctcctcaaggccaatgtgaccagtgagaacaacatgcccagaaccaacaaaaccgaattccaactggagctgccggtgaaatatgctgtctacatggtggtcaccagccatggggtctccactaaatatctcaacttcacggcctcagagaataccagtcgggtcatgcagcatcaatatcaggtcagcaacctggggcagaggagcctccccatcagcctggtgttcttggtgcccgtccggctgaaccagactgtcatatgggaccgcccccaggtcaccttctccgagaacctctcgagtacgtgccacaccaaggagcgcttgccctctcactccgactttctggctgagcttcggaaggcccccgtggtgaactgctccatcgctgtctgccagagaatccagtgtgacatcccgttctttggcatccaggaagaattcaatgctaccctcaaaggcaacctctcgtttgactggtacatcaagacctcgcataaccacctcctgatcgtgagcacagctgagatcttgtttaacgattccgtgttcaccctgctgccgggacagggggcgtttgtgaggtcccagacggagaccaaagtggagccgttcgaggtccccaaccccctgccgctcatcgtgggcagctctgtcgggggactgctgctcctggccctcatcaccgccgcgctgtacaagctcggcttcttcaagcggcaatacaaggacatgatgagtgaagggggtcccccgggggccgaaccccagtagcggctccttcccgacagagctgcctctcggtggccagcaggactctgcccagaccacacgtagcccccaggctgctggacacgtcggacagcgaagtatccccgacaggacgggcttgggcttccatttgtgtgtgtgcaagtgtgtatgtgcgtgtgtgcaagtgtctgtgtgcaagtgtgtgcacatgtgtgcgtgtgcgtgcatgtgcacttgcacgcccatgtgtgagtgtgtgcaagtatgtgagtgtgtccaagtgtgtgtgcgtgtgtccatgtgtgtgcaagtgtgtgcatgtgtgcgagtgtgtgcatgtgtgtgctcaggggcgtgtggctcacgtgtgtgactcagatgtctctggcgtgtgggtaggtgacggcagcgtagcctctccggcagaagggaactgcctgggctcccttgtgcgtgggtgaagccgctgctgggttttcctccgggagaggggacggtcaatcctgtgggtgaagacagagggaaacacagcagcttctctccactgaaagaagtgggacttcccgtcgcctgcgagcctgcggcctgctggagcctgcgcagcttggatggagactccatgagaagccgtgggtggaaccaggaacctcctccacaccagcgctgatgcccaataaagatgcccactgaggaatgatgaagcttcctttctggattcatttattatttcaatgtgactttaattttttggatggataagcttgtctatggtacaaaaatcacaaggcattcaagtgtacagtgaaaagtctccctttccagatattcaagtcacctccttaaaggtagtcaagattgtgttttgaggtttccttcagacagattccaggcgatgtgcaagtgtatgcacgtgtgcacacacaccacacatacacacacacaagcttttttacacaaatggtagcatactttatattggtctgtatcttgctttttttcaccaatatttctcagacatcggttcatattaagacataaattactttttcattcttttataccgctgcatagtattccattgtgtgagtgtaccataatgtatttaaccagtcttcttttgatatactattttcattctcttgttattgcatcaatgctgagttaataaatcaaatatatgtcatttttgcatatatgtaaggataa

SEQ ID NO: 36 - protein, 1152 aa, Homo sapiens
MALRVLLLTALTLCHGFNLDTENAMTFQENARGFGQSVVQLQGSRVVVGAPQEIVAANQRGSLYQCDYSTGSCEPIRLQVPVEAVNMSLGLSLAATTSPPQLLACGPTVHQTCSENTYVKGLCFLFGSNLRQQPQKFPEALRGCPQEDSDIAFLIDGSGSIIPHDFRRMKEFVSTVMEQLKKSKTLFSLMQYSEEFRIHFTFKEFQNNPNPRSLVKPITQLLGRTHTATGIRKVVRELFNITNGARKNAFKILVVITDGEKFGDPLGYEDVIPEADREGVIRYVIGVGDAFRSEKSRQELNTIASKPPRDHVFQVNNFEALKTIQNQLREKIFAIEGTQTGSSSSFEHEMSQEGFSAAITSNGPLLSTVGSYDWAGGVFLYTSKEKSTFINMTRVDSDMNDAYLGYAAAIILRNRVQSLVLGAPRYQHIGLVAMFRQNTGMWESNANVKGTQIGAYFGASLCSVDVDSNGSTDLVLIGAPHYYEQTRGGQVSVCPLPRGRARWQCDAVLYGEQGQPWGRFGAALTVLGDVNGDKLTDVAIGAPGEEDNRGAVYLFHGTSGSGISPSHSQRIAGSKLSPRLQYFGQSLSGGQDLTMDGLVDLTVGAQGHVLLLRSQPVLRVKAIMEFNPREVARNVFECNDQVVKGKEAGEVRVCLHVQKSTRDRLREGQIQSVVTYDLALDSGRPHSRAVFNETKNSTRRQTQVLGLTQTCETLKLQLPNCIEDPVSPIVLRLNFSLVGTPLSAFGNLRPVLAEDAQRLFTALFPFEKNCGNDNICQDDLSITFSFMSLDCLVVGGPREFNVTVTVRNDGEDSYRTQVTFFFPLDLSYRKVSTLQNQRSQRSWRLACESASSTEVSGALKSTSCSINHPIFPENSEVTFNITFDVDSKASLGNKLLLKANVTSENNMPRTNKTEFQLELPVKYAVYMVVTSHGVSTKYLNFTASENTSRVMQHQYQVSNLGQRSLPISLVFLVPVRLNQTVIWDRPQVTFSENLSSTCHTKERLPSHSDFLAELRKAPVVNCSIAVCQRIQCDIPFFGIQEEFNATLKGNLSFDWYIKTSHNHLLIVSTAEILFNDSVFTLLPGQGAFVRSQTETKVEPFEVPNPLPLIVGSSVGGLLLLALITAALYKLGFFKRQYKDMMSEGGPPGAEPQ

SEQ ID NO: 37 - DNA, 1835 bp, Homo sapiens
  CDS (63)..(941)
ctcgctgcgccaccgcctcccgccacccctgcccgcccgacagcgccgccgcctgccccgccatgggtcgacagaaggagctggtgtcccgctgcggggagatgctccacatccgctaccggctgctccgacaggcgctggccgagtgcctggggaccctcatcctggtgatgtttggctgtggctccgtggcccaggttgtgctcagccggggcacccacggtggtttcctcaccatcaacctggcctttggctttgctgtcactctgggcatcctcatcgctggccaggtctctggggcccacctgaaccctgccgtgacctttgccatgtgcttcctggctcgtgagccctggatcaagctgcccatctacaccctggcacagacgctgggagccttcttgggtgctggaatagtttttgggctgtattatgatgcaatctggcacttcgccgacaaccagctttttgtttcgggccccaatggcacagccggcatctttgctacctacccctctggacacttggatatgatcaatggcttctttgaccagttcataggcacagcctcccttatcgtgtgtgtgctggccattgttgacccctacaacaaccccgtcccccgaggcctggaggccttcaccgtgggcctggtggtcctggtcattggcacctccatgggcttcaactccggctatgccgtcaaccctgcccgggactttggcccccgcctttttacagcccttgcgggctggggctctgcagtcttcacgaccggccagcattggtggtgggtgcccatcgtgtccccactcctgggctccattgcgggtgtcttcgtgtaccagctgatgatcggctgccacctggagcagcccccaccctccaacgaggaagagaatgtgaagctggcccatgtgaagcacaaggagcagatctgagtgggcaggggccatctccccactccgctgccctggccttgagcatccactgactgtccaagggccactcccaagaagcccccttcacgatccaccctttcaggctaaggagctccctatctaccctcaccccacgagacagccccttcaggatttccactggaccttgcccaaatagcaccttaggccactgcccctaagctggggtggaaccggaatttgggtcaatacatccttttgtctcccaagggaagagaatgggcagcaggtatgtgtgtgtgtgcatgtgtgtgcatgtgtgtgcatgtgtgtgcaggggtgtgtgtgtgtggggggggttcccagatattcagggcaagggaccagtcggaagggattctggctattgggggagcccagagacaggggaaggcagcctgtccatctgtgcataaggagaggaaagttccagggtgtgtatgtttcaggggcttcacatggaggagctgcagatagatatgtgtttctgtgtatgtgtatgtctgcctttttttctaagtgggggcttctacaggcttttgggaagtagggtggatgtgggtagggctgggaggagggggccacagcttaggtttggagctctggatgtacatacataagtaggagcagtgggacgtgtttctgtcataatgcaggcatgaagggtggagtgaagtcaggtcataagtttcatgtttgcttttgttttgttttgtttttaatgtatgtagcagatgttacagtcttagggatccgggatgggagaccccactttagaaagggtcgtcactcctttaatcctctactcaacaatgtactcttttacttttatattaaaaaaaataaaataaatatgtgcctaaaaaaaaaaaaaaa

SEQ ID NO: 38 - protein, 292 aa, Homo sapiens
MGRQKELVSRCGEMLHIRYRLLRQALAECLGTLILVMFGCGSVAQVVLSRGTHGGFLTINLAFGFAVTLGILIAGQVSGAHLNPAVTFAMCFLAREPWIKLPIYTLAQTLGAFLGAGIVFGLYYDAIWHFADNQLFVSGPNGTAGIFATYPSGHLDMINGFFDQFIGTASLIVCVLAIVDPYNNPVPRGLEAFTVGLVVLVIGTSMGFNSGYAVNPARDFGPRLFTALAGWGSAVFTTGQHWWWVPIVSPLLGSIAGVFVYQLMIGCHLEQPPPSNEEENVKLAHVKHKEQI

SEQ ID NO: 39 - DNA, 5680 bp, Homo sapiens
  CDS (204)..(3479)
aacgggctcattcagcggtcgcgagctgcccgcgagggggagcggccggacggagagcgcgacccgtcccgggggtggggccgggcgcagcggcgagaggaggcgaaggtggctgcggtagcagcagcgcggcagcctcggacccagcccggagcgcagggcggccgctgcaggtccccgctcccctccccgtgcgtccgcccatggccgccgccgggcagctgtgcttgctctacctgtcggcggggctcctgtcccggctcggcgcagccttcaacttggacactcgggaggacaacgtgatccggaaatatggagaccccgggagcctcttcggcttctcgctggccatgcactggcaactgcagcccgaggacaagcggctgttgctcgtgggggccccgcgggcagaagcgcttccactgcagagagccaacagaacgggagggctgtacagctgcgacatcaccgcccgggggccatgcacgcggatcgagtttgataacgatgctgaccccacgtcagaaagcaaggaagatcagtggatgggggtcaccgtccagagccaaggtccagggggcaaggtcgtgacatgtgctcaccgatatgaaaaaaggcagcatgttaatacgaagcaggaatcccgagacatctttgggcggtgttatgtcctgagtcagaatctcaggattgaagacgatatggatgggggagattggagcttttgtgatgggcgattgagaggccatgagaaatttggctcttgccagcaaggtgtagcagctacttttactaaagactttcattacattgtatttggagccccgggtacttataactggaaagggattgttcgtgtagagcaaaagaataacactttttttgacatgaacatctttgaagatgggccttatgaagttggtggagagactgagcatgatgaaagtctcgttcctgttcctgctaacagttacttaggtttttctttggactcagggaaaggtattgtttctaaagatgagatcacttttgtatctggtgctcccagagccaatcacagtggagccgtggttttgctgaagagagacatgaagtctgcacatctcctccctgagcacatattcgatggagaaggtctggcctcttcatttggctatgatgtggcggtggtggacctcaacaaggatgggtggcaagatatagttattggagccccacagtattttgatagagatggagaagttggaggtgcagtgtatgtctacatgaaccagcaaggcagatggaataatgtgaagccaattcgtcttaatggaaccaaagattctatgtttggcattgcagtaaaaaatattggagatattaatcaagatggctacccagatattgcagttggagctccgtatgatgacttgggaaaggtttttatctatcatggatctgcaaatggaataaataccaaaccaacacaggttctcaagggtatatcaccttattttggatattcaattgctggaaacatggaccttgatcgaaattcctaccctgatgttgctgttggttccctctcagattcagtaactattttcagatcccggcctgtgattaatattcagaaaaccatcacagtaactcctaacagaattgacctccgccagaaaacagcgtgtggggcgcctagtgggatatgcctccaggttaaatcctgttttgaatatactgctaaccccgctggttataatccttcaatatcaattgtgggcacacttgaagctgaaaaagaaagaagaaaatctgggctatcctcaagagttcagtttcgaaaccaaggttctgagcccaaatatactcaagaactaactctgaagaggcagaaacagaaagtgtgcatggaggaaaccctgtggctacaggataatatcagagataaactgcgtcccattcccataactgcctcagtggagatccaagagccaagctctcgtaggcgagtgaattcacttccagaagttcttccaattctgaattcagatgaacccaagacagctcatattgatgttcacttcttaaaagagggatgtggagacgacaatgtatgtaacagcaaccttaaactagaatataaattttgcacccgagaaggaaatcaagacaaattttcttatttaccaattcaaaaaggtgtaccagaactagttctaaaagatcagaaggatattgctttagaaataacagtgacaaacagcccttccaacccaaggaatcccacaaaagatggcgatgacgcccatgaggctaaactgattgcaacgtttccagacactttaacctattctgcatatagagaactgagggctttccctgagaaacagttgagttgtgttgccaaccagaatggctcgcaagctgactgtgagctcggaaatccttttaaaagaaattcaaatgtcactttttatttggttttaagtacaactgaagtcacctttgacaccccagatctggatattaatctgaagttagaaacaacaagcaatcaagataatttggctccaattacagctaaagcaaaagtggttattgaactgcttttatcggtctcgggagttgctaaaccttcccaggtgtattttggaggtacagttgttggcgagcaagctatgaaatctgaagatgaagtgggaagtttaatagagtatgaattcagggtaataaacttaggtaaacctcttacaaacctcggcacagcaaccttgaacattcagtggccaaaagaaattagcaatgggaaatggttgctttatttggtgaaagtagaatccaaaggattggaaaaggtaacttgtgagccacaaaaggagataaactccctgaacctaacggagtctcacaactcaagaaagaaacgggaaattactgaaaaacagatagatgataacagaaaattttctttatttgctgaaagaaaataccagactcttaactgtagcgtgaacgtgaactgtgtgaacatcagatgcccgctgcgggggctggacagcaaggcgtctcttattttgcgctcgaggttatggaacagcacatttctagaggaatattccaaactgaactacttggacattctcatgcgagccttcattgatgtgactgctgctgccgaaaatatcaggctgccaaatgcaggcactcaggttcgagtgactgtgtttccctcaaagactgtagctcagtattcgggagtaccttggtggatcatcctagtggctattctcgctgggatcttgatgcttgctttattagtgtttatactatggaagtgtggattctttaaacgctctaggtacgatgacagtgttccccgataccatgctgtaaggatccggaaagaagagcgagagatcaaagatgaaaagtatattgataaccttgaaaaaaaacagtggatcacaaagtggaacgaaaatgaaagctactcatagcgggggcctaaaaaaaaaaagcttcacagtacccaaactgctttttccaactcagaaattcaatttggatttaaaagcctgctcaatccctgaggactgatttcagagtgactacacacagtacgaacctacagttttaactgtggatattgttacgtagcctaaggctcctgttttgcacagccaaatttaaaactgttggaatggatttttctttaactgccgtaatttaactttctgggttgcctttatttttggcgtggctgacttacatcatgtgttggggaagggcctgcccagttgcactcaggtgacatcctccagatagtgtagctgaggaggcacctacactcacctgcactaacagagtggccgtcctaacctcgggcctgctgcgcagacgtccatcacgttagctgtcccacatcacaagactatgccattggggtagttgtgtttcaacggaaagtgctgtcttaaactaaatgtgcaatagaaggtgatgttgccatcctaccgtcttttcctgtttcctagctgtgtgaatacctgctcacgtcaaatgcatacaagtttcattctccctttcactaaaacacacaggtgcaacagacttgaatgctagttatacttatttgtatatggtatttattttttcttttctttacaaaccattttgttattgactaacaggccaaagagtctccagtttacccttcaggttggtttaatcaatcagaattagagcatgggaggtcatcactttgacctaaattatttactgcaaaaagaaaatctttataaatgtaccagagagagttgttttaataacttatctataaactataacctctccttcatgacagcctccaccccacaacccaaaaggtttaagaaatagaattataactgtaaagatgtttatttcaggcattggatattttttactttagaagcctgcataatgtttctggatttcatactgtaacattcaggaattcttggagaaaatgggtttattcactgaactctagtgcggtttactcactgctgcaaatactgtatattcaggacttgaaagaaatggtgaatgcctatggtggatccaaactgatccagtataagactactgaatctgctaccaaaacagttaatcagtgagtcgatgttctattttttgttttgtttcctcccctatctgtattcccaaaaattactttggggctaatttaacaagaactttaaattgtgttttaattgtaaaaatggcagggggtggaattattactctatacattcaacagagactgaatagatatgaaagctgattttttttaattaccatgcttcacaatgttaagttatatggggagcaacagcaaacaggtgctaatttgttttggatatagtataagcagtgtctgtgttttgaaagaatagaacacagtttgtagtgccactgttgttttgggggggcttttttcttttcggaaatcttaaaccttaagatactaaggacgttgttttggttgtactttggaattcttagtcacaaaatatattttgtttacaaaaatttctgtaaaacaggttataacagtgtttaaagtctcagtttcttgcttggggaacttgtgtccctaatgtgtttagattgctagattgctaaggagctgatactttgacagtgtttttagacctgtgttactaaaaaaaagatgaatgtcctgaaaagggtgttgggagggtggttcaacaaagaaacaaagatgttatggtgtttagatttatggttgttaaaaatgtcatctcaagtcaagtcactggtctgtttgcatttgatacatttttgtactaactagcattgtaaaattatttcatgattagaaattacctgtggatatttgtataaaagtgtgaaataaattttttataaaagtgttcattgtttcgtaacacagcattgtatatgtgaagcaaactctaaaattataaatgacaacctgaattatctatttcatcaaaccaaagttcagtgtttttatttttggtgtctcatgtaatctcagatcagccaaagatactagtgccaaagcaatgggattcggggtttttttctgttttcgctctatgtaggtgatcctcaagtctttcattttccttctttatgattaaaagaaacctacaggtatttaacaacc

SEQ ID NO: 40 - protein, 1091 aa, Homo sapiens
MAAAGQLCLLYLSAGLLSRLGAAFNLDTREDNVIRKYGDPGSLFGFSLAMHWQLQPEDKRLLLVGAPRAEALPLQRANRTGGLYSCDITARGPCTRIEFDNDADPTSESKEDQWMGVTVQSQGPGGKVVTCAHRYEKRQHVNTKQESRDIFGRCYVLSQNLRIEDDMDGGDWSFCDGRLRGHEKFGSCQQGVAATFTKDFHYIVFGAPGTYNWKGIVRVEQKNNTFFDMNIFEDGPYEVGGETEHDESLVPVPANSYLGFSLDSGKGIVSKDEITFVSGAPRANHSGAVVLLKRDMKSAHLLPEHIFDGEGLASSFGYDVAVVDLNKDGWQDIVIGAPQYFDRDGEVGGAVYVYMNQQGRWNNVKPIRLNGTKDSMFGIAVKNIGDINQDGYPDIAVGAPYDDLGKVFIYHGSANGINTKPTQVLKGISPYFGYSIAGNMDLDRNSYPDVAVGSLSDSVTIFRSRPVINIQKTITVTPNRIDLRQKTACGAPSGICLQVKSCFEYTANPAGYNPSISIVGTLEAEKERRKSGLSSRVQFRNQGSEPKYTQELTLKRQKQKVCMEETLWLQDNIRDKLRPIPITASVEIQEPSSRRRVNSLPEVLPILNSDEPKTAHIDVHFLKEGCGDDNVCNSNLKLEYKFCTREGNQDKFSYLPIQKGVPELVLKDQKDIALEITVTNSPSNPRNPTKDGDDAHEAKLIATFPDTLTYSAYRELRAFPEKQLSCVANQNGSQADCELGNPFKRNSNVTFYLVLSTTEVTFDTPDLDINLKLETTSNQDNLAPITAKAKVVIELLLSVSGVAKPSQVYFGGTVVGEQAMKSEDEVGSLIEYEFRVINLGKPLTNLGTATLNIQWPKEISNGKWLLYLVKVESKGLEKVTCEPQKEINSLNLTESHNSRKKREITEKQIDDNRKFSLFAERKYQTLNCSVNVNCVNIRCPLRGLDSKASLILRSRLWNSTFLEEYSKLNYLDILMRAFIDVTAAAENIRLPNAGTQVRVTVFPSKTVAQYSGVPWWIILVAILAGILMLALLVFILWKCGFFKRSRYDDSVPRYHAVRIRKEEREIKDEKYIDNLEKKQWITKWNENESYS

SEQ ID NO: 41 - DNA, 5810 bp, Homo sapiens
  CDS (204)..(3425)
aacgggctcattcagcggtcgcgagctgcccgcgagggggagcggccggacggagagcgcgacccgtcccgggggtggggccgggcgcagcggcgagaggaggcgaaggtggctgcggtagcagcagcgcggcagcctcggacccagcccggagcgcagggcggccgctgcaggtccccgctcccctccccgtgcgtccgcccatggccgccgccgggcagctgtgcttgctctacctgtcggcggggctcctgtcccggctcggcgcagccttcaacttggacactcgggaggacaacgtgatccggaaatatggagaccccgggagcctcttcggcttctcgctggccatgcactggcaactgcagcccgaggacaagcggctgttgctcgtgggggccccgcgggcagaagcgcttccactgcagagagccaacagaacgggagggctgtacagctgcgacatcaccgcccgggggccatgcacgcggatcgagtttgataacgatgctgaccccacgtcagaaagcaaggaagatcagtggatgggggtcaccgtccagagccaaggtccagggggcaaggtcgtgacatgtgctcaccgatatgaaaaaaggcagcatgttaatacgaagcaggaatcccgagacatctttgggcggtgttatgtcctgagtcagaatctcaggattgaagacgatatggatgggggagattggagcttttgtgatgggcgattgagaggccatgagaaatttggctcttgccagcaaggtgtagcagctacttttactaaagactttcattacattgtatttggagccccgggtacttataactggaaagggattgttcgtgtagagcaaaagaataacactttttttgacatgaacatctttgaagatgggccttatgaagttggtggagagactgagcatgatgaaagtctcgttcctgttcctgctaacagttacttaggtttttctttggactcagggaaaggtattgtttctaaagatgagatcacttttgtatctggtgctcccagagccaatcacagtggagccgtggttttgctgaagagagacatgaagtctgcacatctcctccctgagcacatattcgatggagaaggtctggcctcttcatttggctatgatgtggcggtggtggacctcaacaaggatgggtggcaagatatagttattggagccccacagtattttgatagagatggagaagttggaggtgcagtgtatgtctacatgaaccagcaaggcagatggaataatgtgaagccaattcgtcttaatggaaccaaagattctatgtttggcattgcagtaaaaaatattggagatattaatcaagatggctacccagatattgcagttggagctccgtatgatgacttgggaaaggtttttatctatcatggatctgcaaatggaataaataccaaaccaacacaggttctcaagggtatatcaccttattttggatattcaattgctggaaacatggaccttgatcgaaattcctaccctgatgttgctgttggttccctctcagattcagtaactattttcagatcccggcctgtgattaatattcagaaaaccatcacagtaactcctaacagaattgacctccgccagaaaacagcgtgtggggcgcctagtgggatatgcctccaggttaaatcctgttttgaatatactgctaaccccgctggttataatccttcaatatcaattgtgggcacacttgaagctgaaaaagaaagaagaaaatctgggctatcctcaagagttcagtttcgaaaccaaggttctgagcccaaatatactcaagaactaactctgaagaggcagaaacagaaagtgtgcatggaggaaaccctgtggctacaggataatatcagagataaactgcgtcccattcccataactgcctcagtggagatccaagagccaagctctcgtaggcgagtgaattcacttccagaagttcttccaattctgaattcagatgaacccaagacagctcatattgatgttcacttcttaaaagagggatgtggagacgacaatgtatgtaacagcaaccttaaactagaatataaattttgcacccgagaaggaaatcaagacaaattttcttatttaccaattcaaaaaggtgtaccagaactagttctaaaagatcagaaggatattgctttagaaataacagtgacaaacagcccttccaacccaaggaatcccacaaaagatggcgatgacgcccatgaggctaaactgattgcaacgtttccagacactttaacctattctgcatatagagaactgagggctttccctgagaaacagttgagttgtgttgccaaccagaatggctcgcaagctgactgtgagctcggaaatccttttaaaagaaattcaaatgtcactttttatttggttttaagtacaactgaagtcacctttgacaccccagatctggatattaatctgaagttagaaacaacaagcaatcaagataatttggctccaattacagctaaagcaaaagtggttattgaactgcttttatcggtctcgggagttgctaaaccttcccaggtgtattttggaggtacagttgttggcgagcaagctatgaaatctgaagatgaagtgggaagtttaatagagtatgaattcagggtaataaacttaggtaaacctcttacaaacctcggcacagcaaccttgaacattcagtggccaaaagaaattagcaatgggaaatggttgctttatttggtgaaagtagaatccaaaggattggaaaaggtaacttgtgagccacaaaaggagataaactccctgaacctaacggagtctcacaactcaagaaagaaacgggaaattactgaaaaacagatagatgataacagaaaattttctttatttgctgaaagaaaataccagactcttaactgtagcgtgaacgtgaactgtgtgaacatcagatgcccgctgcgggggctggacagcaaggcgtctcttattttgcgctcgaggttatggaacagcacatttctagaggaatattccaaactgaactacttggacattctcatgcgagccttcattgatgtgactgctgctgccgaaaatatcaggctgccaaatgcaggcactcaggttcgagtgactgtgtttccctcaaagactgtagctcagtattcgggagtaccttggtggatcatcctagtggctattctcgctgggatcttgatgcttgctttattagtgtttatactatggaagtgtggtttcttcaagagaaataagaaagatcattatgatgccacatatcacaaggctgagatccatgctcagccatctgataaagagaggcttacttctgatgcatagtattgatctacttctgtaattgtgtggattctttaaacgctctaggtacgatgacagtgttccccgataccatgctgtaaggatccggaaagaagagcgagagatcaaagatgaaaagtatattgataaccttgaaaaaaaacagtggatcacaaagtggaacgaaaatgaaagctactcatagcgggggcctaaaaaaaaaaagcttcacagtacccaaactgctttttccaactcagaaattcaatttggatttaaaagcctgctcaatccctgaggactgatttcagagtgactacacacagtacgaacctacagttttaactgtggatattgttacgtagcctaaggctcctgttttgcacagccaaatttaaaactgttggaatggatttttctttaactgccgtaatttaactttctgggttgcctttatttttggcgtggctgacttacatcatgtgttggggaagggcctgcccagttgcactcaggtgacatcctccagatagtgtagctgaggaggcacctacactcacctgcactaacagagtggccgtcctaacctcgggcctgctgcgcagacgtccatcacgttagctgtcccacatcacaagactatgccattggggtagttgtgtttcaacggaaagtgctgtcttaaactaaatgtgcaatagaaggtgatgttgccatcctaccgtcttttcctgtttcctagctgtgtgaatacctgctcacgtcaaatgcatacaagtttcattctccctttcactaaaacacacaggtgcaacagacttgaatgctagttatacttatttgtatatggtatttattttttcttttctttacaaaccattttgttattgactaacaggccaaagagtctccagtttacccttcaggttggtttaatcaatcagaattagagcatgggaggtcatcactttgacctaaattatttactgcaaaaagaaaatctttataaatgtaccagagagagttgttttaataacttatctataaactataacctctccttcatgacagcctccaccccacaacccaaaaggtttaagaaatagaattataactgtaaagatgtttatttcaggcattggatattttttactttagaagcctgcataatgtttctggatttcatactgtaacattcaggaattcttggagaaaatgggtttattcactgaactctagtgcggtttactcactgctgcaaatactgtatattcaggacttgaaagaaatggtgaatgcctatggtggatccaaactgatccagtataagactactgaatctgctaccaaaacagttaatcagtgagtcgatgttctattttttgttttgtttcctcccctatctgtattcccaaaaattactttggggctaatttaacaagaactttaaattgtgttttaattgtaaaaatggcagggggtggaattattactctatacattcaacagagactgaatagatatgaaagctgattttttttaattaccatgcttcacaatgttaagttatatggggagcaacagcaaacaggtgctaatttgttttggatatagtataagcagtgtctgtgttttgaaagaatagaacacagtttgtagtgccactgttgttttgggggggcttttttcttttcggaaatcttaaaccttaagatactaaggacgttgttttggttgtactttggaattcttagtcacaaaatatattttgtttacaaaaatttctgtaaaacaggttataacagtgtttaaagtctcagtttcttgcttggggaacttgtgtccctaatgtgtttagattgctagattgctaaggagctgatactttgacagtgtttttagacctgtgttactaaaaaaaagatgaatgtcctgaaaagggtgttgggagggtggttcaacaaagaaacaaagatgttatggtgtttagatttatggttgttaaaaatgtcatctcaagtcaagtcactggtctgtttgcatttgatacatttttgtactaactagcattgtaaaattatttcatgattagaaattacctgtggatatttgtataaaagtgtgaaataaattttttataaaagtgttcattgtttcgtaacacagcattgtatatgtgaagcaaactctaaaattataaatgacaacctgaattatctatttcatcaaaccaaagttcagtgtttttatttttggtgtctcatgtaatctcagatcagccaaagatactagtgccaaagcaatgggattcggggtttttttctgttttcgctctatgtaggtgatcctcaagtctttcattttccttctttatgattaaaagaaacctacaggtatttaacaacc

SEQ ID NO: 42 - protein, 1073 aa, Homo sapiens
MAAAGQLCLLYLSAGLLSRLGAAFNLDTREDNVIRKYGDPGSLFGFSLAMHWQLQPEDKRLLLVGAPRAEALPLQRANRTGGLYSCDITARGPCTRIEFDNDADPTSESKEDQWMGVTVQSQGPGGKVVTCAHRYEKRQHVNTKQESRDIFGRCYVLSQNLRIEDDMDGGDWSFCDGRLRGHEKFGSCQQGVAATFTKDFHYIVFGAPGTYNWKGIVRVEQKNNTFFDMNIFEDGPYEVGGETEHDESLVPVPANSYLGFSLDSGKGIVSKDEITFVSGAPRANHSGAVVLLKRDMKSAHLLPEHIFDGEGLASSFGYDVAVVDLNKDGWQDIVIGAPQYFDRDGEVGGAVYVYMNQQGRWNNVKPIRLNGTKDSMFGIAVKNIGDINQDGYPDIAVGAPYDDLGKVFIYHGSANGINTKPTQVLKGISPYFGYSIAGNMDLDRNSYPDVAVGSLSDSVTIFRSRPVINIQKTITVTPNRIDLRQKTACGAPSGICLQVKSCFEYTANPAGYNPSISIVGTLEAEKERRKSGLSSRVQFRNQGSEPKYTQELTLKRQKQKVCMEETLWLQDNIRDKLRPIPITASVEIQEPSSRRRVNSLPEVLPILNSDEPKTAHIDVHFLKEGCGDDNVCNSNLKLEYKFCTREGNQDKFSYLPIQKGVPELVLKDQKDIALEITVTNSPSNPRNPTKDGDDAHEAKLIATFPDTLTYSAYRELRAFPEKQLSCVANQNGSQADCELGNPFKRNSNVTFYLVLSTTEVTFDTPDLDINLKLETTSNQDNLAPITAKAKVVIELLLSVSGVAKPSQVYFGGTVVGEQAMKSEDEVGSLIEYEFRVINLGKPLTNLGTATLNIQWPKEISNGKWLLYLVKVESKGLEKVTCEPQKEINSLNLTESHNSRKKREITEKQIDDNRKFSLFAERKYQTLNCSVNVNCVNIRCPLRGLDSKASLILRSRLWNSTFLEEYSKLNYLDILMRAFIDVTAAAENIRLPNAGTQVRVTVFPSKTVAQYSGVPWWIILVAILAGILMLALLVFILWKCGFFKRNKKDHYDATYHKAEIHAQPSDKERLTSDA

SEQ ID NO: 43 - DNA, 2228 bp, Homo sapiens
  CDS (224)..(2116)
tcagcccacttccggggagggaggcagaggaacccctccccgccgctcacccctaagcccagccctcggctcccacccttgtgtacctgggccgaaccattcaccggagcgcgcagcgggtggagtgtggctcggaggaccgcggcgggtcaagcacctttctcccccatatctgaaagcatgccctttgtccacgtcgtttacgctcattaaaacttccagaatgcaacaggacggacttggagtagggacaaggaacggaagtgggaaggggaggagcgtgcacccctcctggccttggtgcgcgccgcgccccctaaggtactttggaagggacgcgcgggccagacgcgcccagacggccgcgatggcgctgttggccggcgggctctccagagggctgggctcccacccggccgccgcaggccgggacgcggtcgtcttcgtgtggcttctgcttagcacctggtgcacagctcctgccagggccatccaggtgaccgtgtccaacccctaccacgtggtgatcctcttccagcctgtgaccctgccctgtacctaccagatgacctcgacccccacgcaacccatcgtcatctggaagtacaagtctttctgccgggaccgcatcgccgatgccttctccccggccagcgtcgacaaccagctcaatgcccagctggcagccgggaacccaggctacaacccctacgttgagtgccaggacagcgtgcgcaccgtcagggtcgtggccaccaagcagggcaacgctgtgaccctgggagattactaccagggccggaggattaccatcaccggaaatgctgacctgacctttgaccagacggcgtggggggacagtggtgtgtattactgctccgtggtctcagcccaggacctccaggggaacaatgaggcctacgcagagctcatcgtccttgactggctcttcgtggttgtggtatgcctggctgccttcctcatcttcctcctcctgggcatctgctggtgccagtgctgcccgcacacttgctgctgctacgtcaggtgcccctgctgcccagacaagtgctgctgccccgaggccctgtatgccgccggcaaagcagccacctcaggtgttcccagcatttatgcccccagcacctatgcccacctgtctcccgccaagaccccacccccaccagctatgattcccatgggccctgcctacaacgggtaccctggaggataccctggagacgttgacaggagtagctcagctggtggccaaggctcctatgtacccctgcttcgggacacggacagcagtgtggcctctgaagtccgcagtggctacaggattcaggccagccagcaggacgactccatgcgggtcctgtactacatggagaaggagctggccaacttcgacccttctcgacctggcccccccagtggccgtgtggagcgggccatgagtgaagtcacctccctccacgaggacgactggcgatctcggccttcccggggccctgccctcaccccgatccgggatgaggagtggggtggccactccccccggagtcccaggggatgggaccaggagcccgccagggagcaggcaggcgggggctggcgggccaggcggccccgggcccgctccgtggacgccctggacgacctcaccccgccgagcaccgccgagtcagggagcaggtctcccacgagtaatggtgggagaagccgggcctacatgcccccgcggagccgcagccgggacgacctctatgaccaagacgactcgagggacttcccacgctcccgggacccccactacgacgacttcaggtctcgggagcgccctcctgccgaccccaggtcccaccaccaccgtacccgggaccctcgggacaacggctccaggtccggggacctcccctatgatgggcggctactggaggaggctgtgaggaagaaggggtcggaggagaggaggagaccccacaaggaggaggaggaagaggcctactacccgcccgcgccgcccccgtactcggagaccgactcgcaggcgtcccgagagcgcaggctcaagaagaacttggccctgagtcgggaaagtttagtcgtctgatctgacgttttctacgtagcttttgtatttttttttttaatttgaaggaacactgatgaagccctgccatacccctcccgagtctaataaaacgtataatcacaaaaaaaaa

SEQ ID NO: 44 - protein, 630 aa, Homo sapiens
MQQDGLGVGTRNGSGKGRSVHPSWPWCAPRPLRYFGRDARARRAQTAAMALLAGGLSRGLGSHPAAAGRDAVVFVWLLLSTWCTAPARAIQVTVSNPYHVVILFQPVTLPCTYQMTSTPTQPIVIWKYKSFCRDRIADAFSPASVDNQLNAQLAAGNPGYNPYVECQDSVRTVRVVATKQGNAVTLGDYYQGRRITITGNADLTFDQTAWGDSGVYYCSVVSAQDLQGNNEAYAELIVLDWLFVVVVCLAAFLIFLLLGICWCQCCPHTCCCYVRCPCCPDKCCCPEALYAAGKAATSGVPSIYAPSTYAHLSPAKTPPPPAMIPMGPAYNGYPGGYPGDVDRSSSAGGQGSYVPLLRDTDSSVASEVRSGYRIQASQQDDSMRVLYYMEKELANFDPSRPGPPSGRVERAMSEVTSLHEDDWRSRPSRGPALTPIRDEEWGGHSPRSPRGWDQEPAREQAGGGWRARRPRARSVDALDDLTPPSTAESGSRSPTSNGGRSRAYMPPRSRSRDDLYDQDDSRDFPRSRDPHYDDFRSRERPPADPRSHHHRTRDPRDNGSRSGDLPYDGRLLEEAVRKKGSEERRRPHKEEEEEAYYPPAPPPYSETDSQASRERRLKKNLALSRESLVV

SEQ ID NO: 45 - DNA, 2285 bp, Homo sapiens
  CDS (224)..(2173)
tcagcccacttccggggagggaggcagaggaacccctccccgccgctcacccctaagcccagccctcggctcccacccttgtgtacctgggccgaaccattcaccggagcgcgcagcgggtggagtgtggctcggaggaccgcggcgggtcaagcacctttctcccccatatctgaaagcatgccctttgtccacgtcgtttacgctcattaaaacttccagaatgcaacaggacggacttggagtagggacaaggaacggaagtgggaaggggaggagcgtgcacccctcctggccttggtgcgcgccgcgccccctaaggtactttggaagggacgcgcgggccagacgcgcccagacggccgcgatggcgctgttggccggcgggctctccagagggctgggctcccacccggccgccgcaggccgggacgcggtcgtcttcgtgtggcttctgcttagcacctggtgcacagctcctgccagggccatccaggtgaccgtgtccaacccctaccacgtggtgatcctcttccagcctgtgaccctgccctgtacctaccagatgacctcgacccccacgcaacccatcgtcatctggaagtacaagtctttctgccgggaccgcatcgccgatgccttctccccggccagcgtcgacaaccagctcaatgcccagctggcagccgggaacccaggctacaacccctacgttgagtgccaggacagcgtgcgcaccgtcagggtcgtggccaccaagcagggcaacgctgtgaccctgggagattactaccagggccggaggattaccatcaccggaaatgctgacctgacctttgaccagacggcgtggggggacagtggtgtgtattactgctccgtggtctcagcccaggacctccaggggaacaatgaggcctacgcagagctcatcgtccttgggaggacctcaggggtggctgagctcttacctggttttcaggcggggcccatagaagactggctcttcgtggttgtggtatgcctggctgccttcctcatcttcctcctcctgggcatctgctggtgccagtgctgcccgcacacttgctgctgctacgtcaggtgcccctgctgcccagacaagtgctgctgccccgaggccctgtatgccgccggcaaagcagccacctcaggtgttcccagcatttatgcccccagcacctatgcccacctgtctcccgccaagaccccacccccaccagctatgattcccatgggccctgcctacaacgggtaccctggaggataccctggagacgttgacaggagtagctcagctggtggccaaggctcctatgtacccctgcttcgggacacggacagcagtgtggcctctgaagtccgcagtggctacaggattcaggccagccagcaggacgactccatgcgggtcctgtactacatggagaaggagctggccaacttcgacccttctcgacctggcccccccagtggccgtgtggagcgggccatgagtgaagtcacctccctccacgaggacgactggcgatctcggccttcccggggccctgccctcaccccgatccgggatgaggagtggggtggccactccccccggagtcccaggggatgggaccaggagcccgccagggagcaggcaggcgggggctggcgggccaggcggccccgggcccgctccgtggacgccctggacgacctcaccccgccgagcaccgccgagtcagggagcaggtctcccacgagtaatggtgggagaagccgggcctacatgcccccgcggagccgcagccgggacgacctctatgaccaagacgactcgagggacttcccacgctcccgggacccccactacgacgacttcaggtctcgggagcgccctcctgccgaccccaggtcccaccaccaccgtacccgggaccctcgggacaacggctccaggtccggggacctcccctatgatgggcggctactggaggaggctgtgaggaagaaggggtcggaggagaggaggagaccccacaaggaggaggaggaagaggcctactacccgcccgcgccgcccccgtactcggagaccgactcgcaggcgtcccgagagcgcaggctcaagaagaacttggccctgagtcgggaaagtttagtcgtctgatctgacgttttctacgtagcttttgtatttttttttttaatttgaaggaacactgatgaagccctgccatacccctcccgagtctaataaaacgtataatcacaaaaaaaaa

SEQ ID NO: 46 - protein, 649 aa, Homo sapiens
MQQDGLGVGTRNGSGKGRSVHPSWPWCAPRPLRYFGRDARARRAQTAAMALLAGGLSRGLGSHPAAAGRDAVVFVWLLLSTWCTAPARAIQVTVSNPYHVVILFQPVTLPCTYQMTSTPTQPIVIWKYKSFCRDRIADAFSPASVDNQLNAQLAAGNPGYNPYVECQDSVRTVRVVATKQGNAVTLGDYYQGRRITITGNADLTFDQTAWGDSGVYYCSVVSAQDLQGNNEAYAELIVLGRTSGVAELLPGFQAGPIEDWLFVVVVCLAAFLIFLLLGICWCQCCPHTCCCYVRCPCCPDKCCCPEALYAAGKAATSGVPSIYAPSTYAHLSPAKTPPPPAMIPMGPAYNGYPGGYPGDVDRSSSAGGQGSYVPLLRDTDSSVASEVRSGYRIQASQQDDSMRVLYYMEKELANFDPSRPGPPSGRVERAMSEVTSLHEDDWRSRPSRGPALTPIRDEEWGGHSPRSPRGWDQEPAREQAGGGWRARRPRARSVDALDDLTPPSTAESGSRSPTSNGGRSRAYMPPRSRSRDDLYDQDDSRDFPRSRDPHYDDFRSRERPPADPRSHHHRTRDPRDNGSRSGDLPYDGRLLEEAVRKKGSEERRRPHKEEEEEAYYPPAPPPYSETDSQASRERRLKKNLALSRESLVV

SEQ ID NO: 47 - DNA, 2081 bp, Homo sapiens
  CDS (224)..(1969)
tcagcccacttccggggagggaggcagaggaacccctccccgccgctcacccctaagcccagccctcggctcccacccttgtgtacctgggccgaaccattcaccggagcgcgcagcgggtggagtgtggctcggaggaccgcggcgggtcaagcacctttctcccccatatctgaaagcatgccctttgtccacgtcgtttacgctcattaaaacttccagaatgcaacaggacggacttggagtagggacaaggaacggaagtgggaaggggaggagcgtgcacccctcctggccttggtgcgcgccgcgccccctaaggtactttggaagggacgcgcgggccagacgcgcccagacggccgcgatggcgctgttggccggcgggctctccagagggctgggctcccacccggccgccgcaggccgggacgcggtcgtcttcgtgtggcttctgcttagcacctggtgcacagctcctgccagggccatccaggtgaccgtgtccaacccctaccacgtggtgatcctcttccagcctgtgaccctgccctgtacctaccagatgacctcgacccccacgcaacccatcgtcatctggaagtacaagtctttctgccgggaccgcatcgccgatgccttctccccggccagcgtcgacaaccagctcaatgcccagctggcagccgggaacccaggctacaacccctacgttgagtgccaggacagcgtgcgcaccgtcagggtcgtggccaccaagcagggcaacgctgtgaccctgggagattactaccagggccggaggattaccatcaccggaaatgctgacctgacctttgaccagacggcgtggggggacagtggtgtgtattactgctccgtggtctcagcccaggacctccaggggaacaatgaggcctacgcagagctcatcgtccttgtgtatgccgccggcaaagcagccacctcaggtgttcccagcatttatgcccccagcacctatgcccacctgtctcccgccaagaccccacccccaccagctatgattcccatgggccctgcctacaacgggtaccctggaggataccctggagacgttgacaggagtagctcagctggtggccaaggctcctatgtacccctgcttcgggacacggacagcagtgtggcctctgaagtccgcagtggctacaggattcaggccagccagcaggacgactccatgcgggtcctgtactacatggagaaggagctggccaacttcgacccttctcgacctggcccccccagtggccgtgtggagcgggccatgagtgaagtcacctccctccacgaggacgactggcgatctcggccttcccggggccctgccctcaccccgatccgggatgaggagtggggtggccactccccccggagtcccaggggatgggaccaggagcccgccagggagcaggcaggcgggggctggcgggccaggcggccccgggcccgctccgtggacgccctggacgacctcaccccgccgagcaccgccgagtcagggagcaggtctcccacgagtaatggtgggagaagccgggcctacatgcccccgcggagccgcagccgggacgacctctatgaccaagacgactcgagggacttcccacgctcccgggacccccactacgacgacttcaggtctcgggagcgccctcctgccgaccccaggtcccaccaccaccgtacccgggaccctcgggacaacggctccaggtccggggacctcccctatgatgggcggctactggaggaggctgtgaggaagaaggggtcggaggagaggaggagaccccacaaggaggaggaggaagaggcctactacccgcccgcgccgcccccgtactcggagaccgactcgcaggcgtcccgagagcgcaggctcaagaagaacttggccctgagtcgggaaagtttagtcgtctgatctgacgttttctacgtagcttttgtatttttttttttaatttgaaggaacactgatgaagccctgccatacccctcccgagtctaataaaacgtataatcacaaaaaaaaa

SEQ ID NO: 48 - protein, 581 aa, Homo sapiens
MQQDGLGVGTRNGSGKGRSVHPSWPWCAPRPLRYFGRDARARRAQTAAMALLAGGLSRGLGSHPAAAGRDAVVFVWLLLSTWCTAPARAIQVTVSNPYHVVILFQPVTLPCTYQMTSTPTQPIVIWKYKSFCRDRIADAFSPASVDNQLNAQLAAGNPGYNPYVECQDSVRTVRVVATKQGNAVTLGDYYQGRRITITGNADLTFDQTAWGDSGVYYCSVVSAQDLQGNNEAYAELIVLVYAAGKAATSGVPSIYAPSTYAHLSPAKTPPPPAMIPMGPAYNGYPGGYPGDVDRSSSAGGQGSYVPLLRDTDSSVASEVRSGYRIQASQQDDSMRVLYYMEKELANFDPSRPGPPSGRVERAMSEVTSLHEDDWRSRPSRGPALTPIRDEEWGGHSPRSPRGWDQEPAREQAGGGWRARRPRARSVDALDDLTPPSTAESGSRSPTSNGGRSRAYMPPRSRSRDDLYDQDDSRDFPRSRDPHYDDFRSRERPPADPRSHHHRTRDPRDNGSRSGDLPYDGRLLEEAVRKKGSEERRRPHKEEEEEAYYPPAPPPYSETDSQASRERRLKKNLALSRESLVV

SEQ ID NO: 49 - DNA, 3497 bp, Homo sapiens
  CDS (114)..(1694)
aggctcagcacagagagtggaaaacagcagaggtgacagagcagccgtgctcgaagcgttcctggagcccaagctctcctccacaggtgaagacagggccagcaggagacaccatggggcacctctcagccccacttcacagagtgcgtgtaccctggcaggggcttctgctcacagcctcacttctaaccttctggaacccgcccaccactgcccagctcactactgaatccatgccattcaatgttgcagaggggaaggaggttcttctccttgtccacaatctgccccagcaactttttggctacagctggtacaaaggggaaagagtggatggcaaccgtcaaattgtaggatatgcaataggaactcaacaagctaccccagggcccgcaaacagcggtcgagagacaatataccccaatgcatccctgctgatccagaacgtcacccagaatgacacaggattctacaccctacaagtcataaagtcagatcttgtgaatgaagaagcaactggacagttccatgtatacccggagctgcccaagccctccatctccagcaacaactccaaccctgtggaggacaaggatgctgtggccttcacctgtgaacctgagactcaggacacaacctacctgtggtggataaacaatcagagcctcccggtcagtcccaggctgcagctgtccaatggcaacaggaccctcactctactcagtgtcacaaggaatgacacaggaccctatgagtgtgaaatacagaacccagtgagtgcgaaccgcagtgacccagtcaccttgaatgtcacctatggcccggacacccccaccatttccccttcagacacctattaccgtccaggggcaaacctcagcctctcctgctatgcagcctctaacccacctgcacagtactcctggcttatcaatggaacattccagcaaagcacacaagagctctttatccctaacatcactgtgaataatagtggatcctatacctgccacgccaataactcagtcactggctgcaacaggaccacagtcaagacgatcatagtcactgagctaagtccagtagtagcaaagccccaaatcaaagccagcaagaccacagtcacaggagataaggactctgtgaacctgacctgctccacaaatgacactggaatctccatccgttggttcttcaaaaaccagagtctcccgtcctcggagaggatgaagctgtcccagggcaacaccaccctcagcataaaccctgtcaagagggaggatgctgggacgtattggtgtgaggtcttcaacccaatcagtaagaaccaaagcgaccccatcatgctgaacgtaaactataatgctctaccacaagaaaatggcctctcacctggggccattgctggcattgtgattggagtagtggccctggttgctctgatagcagtagccctggcatgttttctgcatttcgggaagaccggcagggcaagcgaccagcgtgatctcacagagcacaaaccctcagtctccaaccacactcaggaccactccaatgacccacctaacaagatgaatgaagttacttattctaccctgaactttgaagcccagcaacccacacaaccaacttcagcctccccatccctaacagccacagaaataatttattcagaagtaaaaaagcagtaatgaaacctgtcctgctcactgcagtgctgatgtatttcaagtctctcaccctcatcactaggagattcctttcccctgtaggggtagaggggtggggacagaaacaactttctcctactcttccttcctaataggcatctccaggctgcctggtcactgcccctctctcagtgtcaatagatgaaagtacattgggagtctgtaggaaacccaaccttcttgtcattgaaatttggcaaagctgactttgggaaagagggaccagaacttcccctcccttccccttttcccaacctggacttgttttaaacttgcctgttcagagcactcattccttcccacccccagtcctgtcctatcactctaattcggatttgccatagccttgaggttatgtccttttccattaagtacatgtgccaggaaacaagagagagagaaagtaaaggcagtaatgccttctcctatttctccaaagccttgtgtgaactcaccaaacacaagaaaatcaaatatataaccaatagtgaaatgccacacctttgtccactgtcagggttgtctacctgtaggatcagggtctaagcaccttggtgcttagctagaataccacctaatccttctggcaagcctgtcttcagagaacccactagaagcaactaggaaaatcacttgccaaaatccaaggcaattcctgatggaaaatgcaaaagcacatatatgttttaatatctttatgggctctgttcaaggcagtgctgagagggaggggttatagcttcaggagggaaccagcttctgataaacacaatctgctaggaacttgggaaaggaatcagagagctgcccttcagcgattatttaaattattgttaaagaatacacaatttggggtattgggatttttctccttttctctgagacattccaccattttaatttttgtaactgcttatttatgtgaaaagggttatttttacttagcttagctatgtcagccaatccgattgccttaggtgaaagaaaccaccgaaatccctcaggtcccttggtcaggagcctctcaagattttttttgtcagaggctccaaatagaaaataagaaaaggttttcttcattcatggctagagctagatttaactcagtttctaggcacctcagaccaatcatcaactaccattctattccatgtttgcacctgtgcattttctgtttgcccccattcactttgtcaggaaaccttggcctctgctaaggtgtatttggtccttgagaagtgggagcaccctacagggacactatcactcatgctggtggcattgtttacagctagaaagctgcactggtgctaatgccccttggggaaatggggctgtgaggaggaggattataacttaggcctagcctcttttaacagcctctgaaatttatcttttcttctatggggtctataaatgtatcttataataaaaaggaaggacaggaggaagacaggcaaatgtacttctcacccagtcttctacacagatggaatctctttggggctaagagaaaggttttattctatattgcttacctgatctcatgttaggcctaagaggctttctccaggaggattagcttggagttctctatactcaggtacctctttcagggttttctaaccctgacacggactgtgcatactttccctcatccatgctgtgctgtgttatttaatttttcctggctaagatcatgtctgaattatgtatgaaaattattctatgtttttataataaaaataatatatcagacatcga

SEQ ID NO: 50 - protein, 526 aa, Homo sapiens
MGHLSAPLHRVRVPWQGLLLTASLLTFWNPPTTAQLTTESMPFNVAEGKEVLLLVHNLPQQLFGYSWYKGERVDGNRQIVGYAIGTQQATPGPANSGRETIYPNASLLIQNVTQNDTGFYTLQVIKSDLVNEEATGQFHVYPELPKPSISSNNSNPVEDKDAVAFTCEPETQDTTYLWWINNQSLPVSPRLQLSNGNRTLTLLSVTRNDTGPYECEIQNPVSANRSDPVTLNVTYGPDTPTISPSDTYYRPGANLSLSCYAASNPPAQYSWLINGTFQQSTQELFIPNITVNNSGSYTCHANNSVTGCNRTTVKTIIVTELSPVVAKPQIKASKTTVTGDKDSVNLTCSTNDTGISIRWFFKNQSLPSSERMKLSQGNTTLSINPVKREDAGTYWCEVFNPISKNQSDPIMLNVNYNALPQENGLSPGAIAGIVIGVVALVALIAVALACFLHFGKTGRASDQRDLTEHKPSVSNHTQDHSNDPPNKMNEVTYSTLNFEAQQPTQPTSASPSLTATEIIYSEVKKQ

SEQ ID NO: 51 - DNA, 3444 bp, Homo sapiens
  CDS (114)..(1508)
aggctcagcacagagagtggaaaacagcagaggtgacagagcagccgtgctcgaagcgttcctggagcccaagctctcctccacaggtgaagacagggccagcaggagacaccatggggcacctctcagccccacttcacagagtgcgtgtaccctggcaggggcttctgctcacagcctcacttctaaccttctggaacccgcccaccactgcccagctcactactgaatccatgccattcaatgttgcagaggggaaggaggttcttctccttgtccacaatctgccccagcaactttttggctacagctggtacaaaggggaaagagtggatggcaaccgtcaaattgtaggatatgcaataggaactcaacaagctaccccagggcccgcaaacagcggtcgagagacaatataccccaatgcatccctgctgatccagaacgtcacccagaatgacacaggattctacaccctacaagtcataaagtcagatcttgtgaatgaagaagcaactggacagttccatgtatacccggagctgcccaagccctccatctccagcaacaactccaaccctgtggaggacaaggatgctgtggccttcacctgtgaacctgagactcaggacacaacctacctgtggtggataaacaatcagagcctcccggtcagtcccaggctgcagctgtccaatggcaacaggaccctcactctactcagtgtcacaaggaatgacacaggaccctatgagtgtgaaatacagaacccagtgagtgcgaaccgcagtgacccagtcaccttgaatgtcacctatggcccggacacccccaccatttccccttcagacacctattaccgtccaggggcaaacctcagcctctcctgctatgcagcctctaacccacctgcacagtactcctggcttatcaatggaacattccagcaaagcacacaagagctctttatccctaacatcactgtgaataatagtggatcctatacctgccacgccaataactcagtcactggctgcaacaggaccacagtcaagacgatcatagtcactgagctaagtccagtagtagcaaagccccaaatcaaagccagcaagaccacagtcacaggagataaggactctgtgaacctgacctgctccacaaatgacactggaatctccatccgttggttcttcaaaaaccagagtctcccgtcctcggagaggatgaagctgtcccagggcaacaccaccctcagcataaaccctgtcaagagggaggatgctgggacgtattggtgtgaggtcttcaacccaatcagtaagaaccaaagcgaccccatcatgctgaacgtaaactataatgctctaccacaagaaaatggcctctcacctggggccattgctggcattgtgattggagtagtggccctggttgctctgatagcagtagccctggcatgttttctgcatttcgggaagaccggcagctcaggaccactccaatgacccacctaacaagatgaatgaagttacttattctaccctgaactttgaagcccagcaacccacacaaccaacttcagcctccccatccctaacagccacagaaataatttattcagaagtaaaaaagcagtaatgaaacctgtcctgctcactgcagtgctgatgtatttcaagtctctcaccctcatcactaggagattcctttcccctgtaggggtagaggggtggggacagaaacaactttctcctactcttccttcctaataggcatctccaggctgcctggtcactgcccctctctcagtgtcaatagatgaaagtacattgggagtctgtaggaaacccaaccttcttgtcattgaaatttggcaaagctgactttgggaaagagggaccagaacttcccctcccttccccttttcccaacctggacttgttttaaacttgcctgttcagagcactcattccttcccacccccagtcctgtcctatcactctaattcggatttgccatagccttgaggttatgtccttttccattaagtacatgtgccaggaaacaagagagagagaaagtaaaggcagtaatgccttctcctatttctccaaagccttgtgtgaactcaccaaacacaagaaaatcaaatatataaccaatagtgaaatgccacacctttgtccactgtcagggttgtctacctgtaggatcagggtctaagcaccttggtgcttagctagaataccacctaatccttctggcaagcctgtcttcagagaacccactagaagcaactaggaaaatcacttgccaaaatccaaggcaattcctgatggaaaatgcaaaagcacatatatgttttaatatctttatgggctctgttcaaggcagtgctgagagggaggggttatagcttcaggagggaaccagcttctgataaacacaatctgctaggaacttgggaaaggaatcagagagctgcccttcagcgattatttaaattattgttaaagaatacacaatttggggtattgggatttttctccttttctctgagacattccaccattttaatttttgtaactgcttatttatgtgaaaagggttatttttacttagcttagctatgtcagccaatccgattgccttaggtgaaagaaaccaccgaaatccctcaggtcccttggtcaggagcctctcaagattttttttgtcagaggctccaaatagaaaataagaaaaggttttcttcattcatggctagagctagatttaactcagtttctaggcacctcagaccaatcatcaactaccattctattccatgtttgcacctgtgcattttctgtttgcccccattcactttgtcaggaaaccttggcctctgctaaggtgtatttggtccttgagaagtgggagcaccctacagggacactatcactcatgctggtggcattgtttacagctagaaagctgcactggtgctaatgccccttggggaaatggggctgtgaggaggaggattataacttaggcctagcctcttttaacagcctctgaaatttatcttttcttctatggggtctataaatgtatcttataataaaaaggaaggacaggaggaagacaggcaaatgtacttctcacccagtcttctacacagatggaatctctttggggctaagagaaaggttttattctatattgcttacctgatctcatgttaggcctaagaggctttctccaggaggattagcttggagttctctatactcaggtacctctttcagggttttctaaccctgacacggactgtgcatactttccctcatccatgctgtgctgtgttatttaatttttcctggctaagatcatgtctgaattatgtatgaaaattattctatgtttttataataaaaataatatatcagacatcga

SEQ ID NO: 52 - protein, 464 aa, Homo sapiens
MGHLSAPLHRVRVPWQGLLLTASLLTFWNPPTTAQLTTESMPFNVAEGKEVLLLVHNLPQQLFGYSWYKGERVDGNRQIVGYAIGTQQATPGPANSGRETIYPNASLLIQNVTQNDTGFYTLQVIKSDLVNEEATGQFHVYPELPKPSISSNNSNPVEDKDAVAFTCEPETQDTTYLWWINNQSLPVSPRLQLSNGNRTLTLLSVTRNDTGPYECEIQNPVSANRSDPVTLNVTYGPDTPTISPSDTYYRPGANLSLSCYAASNPPAQYSWLINGTFQQSTQELFIPNITVNNSGSYTCHANNSVTGCNRTTVKTIIVTELSPVVAKPQIKASKTTVTGDKDSVNLTCSTNDTGISIRWFFKNQSLPSSERMKLSQGNTTLSINPVKREDAGTYWCEVFNPISKNQSDPIMLNVNYNALPQENGLSPGAIAGIVIGVVALVALIAVALACFLHFGKTGSSGPLQ

SEQ ID NO: 53 - DNA, 1554 bp, Homo sapiens
  CDS (215)..(1192)
gcgcgcctcgccggcgcctccatcccggatccttgctgcagcgtcagcgccgccgcccgtgcctttcctcttcctcctcctcctccttggcatccgcctcttcttcctcctgcgtcctcccccgctgcctccgctgctcccgacgcggagcccggagcccgcgccgagcccctggcctcgcggtgccatgctgccccggcggcggcgctgaaggatggcgacgccgctgcctccgccctccccgcggcacctgcggctgctgcggctgctgctctccggcctcgtcctcggcgccgccctgcgtggagccgccgccggccacccggatgtagccgcctgtcccgggagcctggactgtgccctgaagaggcgggcaaggtgtcctcctggtgcacatgcctgtgggccctgccttcagcccttccaggaggaccagcaagggctctgtgtgcccaggatgcgccggcctccaggcgggggccggccccagcccagactggaagatgagattgacttcctggcccaggagcttgcccggaaggagtctggacactcaactccgcccctacccaaggaccgacagcggctcccggagcctgccaccctgggcttctcggcacgggggcaggggctggagctgggcctcccctccactccaggaacccccacgcccacgccccacacctccatgggctcccctgtgtcatccgacccggtgcacatgtcgcccctggagccccggggagggcaaggcgacggcctcgcccttgtgctgatcctggcgttctgtgtggccggtgcagccgccctctccgtagcctccctctgctggtgcaggctgcatcgtgagatccgcctgactcagaaggccgactacgccactgcgaaggcccctggctcacctgcagctccccggatctcgcctggggaccaacggctggcacagagcgcggagatgtaccactaccagcaccaacggcaacagatgctgtgcctggagcggcataaagagccacccaaggagctggacacggcctcctcggatgaggagaatgaggacggagacttcacggtgtacgagtgcccgggcctggccccgaccggggaaatggaggtgcgcaaccctctgttcgaccacgccgcactgtccgcgcccctgccggcccccagctcaccgcctgcactgccatgacctggaggcagacagacgcccacctgctccccgacctcgaggcccccggggaggggcagggcctggagcttcccactaaaaacatgttttgatgctgtgtgcttttggctgggcctcgggctccaggccctgggaccccttgccagggagacccccgaacctttgtgccaggacacctcctggtcccctgcacctctcctgttcggtttagacccccaaactggagggggcatggagaaccgtagagcgcaggaacgggtgggtaattctagagacaaaagccaattaaagtccatttcagaaaaaaaaaaaaaaaaaaaaaaaaaaaaaaaaaaaaaaaaaaaaaaaaaaaaaaaaaaaaa

SEQ ID NO: 54 - protein, 325 aa, Homo sapiens
MATPLPPPSPRHLRLLRLLLSGLVLGAALRGAAAGHPDVAACPGSLDCALKRRARCPPGAHACGPCLQPFQEDQQGLCVPRMRRPPGGGRPQPRLEDEIDFLAQELARKESGHSTPPLPKDRQRLPEPATLGFSARGQGLELGLPSTPGTPTPTPHTSMGSPVSSDPVHMSPLEPRGGQGDGLALVLILAFCVAGAAALSVASLCWCRLHREIRLTQKADYATAKAPGSPAAPRISPGDQRLAQSAEMYHYQHQRQQMLCLERHKEPPKELDTASSDEENEDGDFTVYECPGLAPTGEMEVRNPLFDHAALSAPLPAPSSPPALP

SEQ ID NO: 55 - DNA, 4536 bp, Homo sapiens
  CDS (221)..(3175)
gaattccacatgcacacccacacccacgcgcgcccgcaccgccccacgcgcacacactcctgcccacgcccacgcagcgctccgggaagtccggtccgggcgagagcgcgaaaggataccgagaagccacccgcggagagcgcagcggcgccctgggacgcggcgctctcccggcgctgctgcctcggcttggtctcggcctgcgggccgtcggccggcgatggccctggattatctactactgctcctcctggcatccgcagtggctgcgatggaagaaacgttaatggacaccagaacggctactgcagagctgggctggacggccaatcctgcgtccgggtgggaagaagtcagtggctacgatgaaaacctgaacaccatccgcacctaccaggtgtgcaatgtcttcgagcccaaccagaacaattggctgctcaccaccttcatcaaccggcggggggcccatcgcatctacacagagatgcgcttcactgtgagagactgcagcagcctccctaatgtcccaggatcctgcaaggagaccttcaacttgtattactatgagactgactctgtcattgccaccaagaagtcagccttctggtctgaggccccctacctcaaagtagacaccattgctgcagatgagagcttctcccaggtggactttgggggaaggctgatgaaggtaaacacagaagtcaggagctttgggcctcttactcggaatggtttttacctcgcttttcaggattatggagcctgtatgtctcttctttctgtccgtgtcttcttcaaaaagtgtcccagcattgtgcaaaattttgcagtgtttccagagactatgacaggggcagagagcacatctctggtgattgctcggggcacatgcatccccaacgcagaggaagtggacgtgcccatcaaactctactgcaacggggatggggaatggatggtgcctattgggcgatgcacctgcaagcctggctatgagcctgagaacagcgtggcatgcaaggcttgccctgcagggacattcaaggccagccaggaagctgaaggctgctcccactgcccctccaacagccgctcccctgcagaggcgtctcccatctgcacctgtcggaccggttattaccgagcggactttgaccctccagaagtggcatgcactagcgtcccatcaggtccccgcaatgttatctccatcgtcaatgagacgtccatcattctggagtggcaccctccaagggagacaggtgggcgggatgatgtgacctacaacatcatctgcaaaaagtgccgggcagaccgccggagctgctcccgctgtgacgacaatgtggagtttgtgcccaggcagctgggcctgacggagtgccgcgtctccatcagcagcctgtgggcccacaccccctacacctttgacatccaggccatcaatggagtctccagcaagagtcccttccccccacagcacgtctctgtcaacatcaccacaaaccaagccgccccctccaccgttcccatcatgcaccaagtcagtgccactatgaggagcatcaccttgtcatggccacagccggagcagcccaatggcatcatcctggactatgagatccggtactatgagaaggaacacaatgagttcaactcctccatggccaggagtcagaccaacacagcaaggattgatgggctgcggcctggcatggtatatgtggtacaggtgcgtgcccgcactgttgctggctacggcaagttcagtggcaagatgtgcttccagactctgactgacgatgattacaagtcagagctgagggagcagctgcccctgattgctggctcggcagcggccggggtcgtgttcgttgtgtccttggtggccatctctatcgtctgtagcaggaaacgggcttatagcaaagaggctgtgtacagcgataagctccagcattacagcacaggccgaggctccccagggatgaagatctacattgaccccttcacttacgaggatcccaacgaagctgtccgggagtttgccaaggagattgatgtatcttttgtgaaaattgaagaggtcatcggagcaggggagtttggagaagtgtacaaggggcgtttgaaactgccaggcaagagggaaatctacgtggccatcaagaccctgaaggcagggtactcggagaagcagcgtcgggactttctgagtgaggcgagcatcatgggccagttcgaccatcctaacatcattcgcctggagggtgtggtcaccaagagtcggcctgtcatgatcatcacagagttcatggagaatggtgcattggattctttcctcaggcaaaatgacgggcagttcaccgtgatccagcttgtgggtatgctcaggggcatcgctgctggcatgaagtacctggctgagatgaattatgtgcatcgggacctggctgctaggaacattctggtcaacagtaacctggtgtgcaaggtgtccgactttggcctctcccgctacctccaggatgacacctcagatcccacctacaccagctccttgggagggaagatccctgtgagatggacagctccagaggccatcgcctaccgcaagttcacttcagccagcgacgtttggagctatgggatcgtcatgtgggaagtcatgtcatttggagagagaccctattgggatatgtccaaccaagatgtcatcaatgccatcgagcaggactaccggctgcccccacccatggactgtccagctgctctacaccagctcatgctggactgttggcagaaggaccggaacagccggccccggtttgcggagattgtcaacaccctagataagatgatccggaacccggcaagtctcaagactgtggcaaccatcaccgccgtgccttcccagcccctgctcgaccgctccatcccagacttcacggcctttaccaccgtggatgactggctcagcgccatcaaaatggtccagtacagggacagcttcctcactgctggcttcacctccctccagctggtcacccagatgacatcagaagacctcctgagaataggcatcaccttggcaggccatcagaagaagatcctgaacagcattcattctatgagggtccagataagtcagtcaccaacggcaatggcatgagaactcttgtttcttggggaaggagaggagggaaaaggaccagggtcaagggggaccagaggttgaccactgtggaatgtactggagagactggcttctcagctgaggaatgcatttccatcagtgaagaatcaaccggacctgttgctagcaggcaatctccatttctcagtgacagaagcatgtttgagatgccgtgggaaaccaaatatataataataaaaatataaaaaggtgatgttcaacagaagtgaagacaaaacaatatgcatcaggagaacaagagtaaacccagctcccactctcagtgggctgcagttgcccaaccacaggaagaaagggaaggaggtagagggaagaaacagaagcagtgttccattttcttcctcaccaatgacattcttttcttttctcctttcgtactcctccctgagagtcccctcccttctcccacactcgtttccctttgctcatgactcctgtagggaagtttcttcaaacaaaacccagctcctgagtctccagatgttgttctgtcagttgccaaaggactttgctgaccactgcatggggatccaaccaattcaattaatgtcttcatattgaagaagagatgtaccttcaattgaaaacctcgtttttcttttgtttgcattttctgcaaaaaggaaaaagaaaccacaaattggggaaaaaaaaagaagaaaaacctgtttccgtgtgcaaaagcacacatatgtatgtctgtgttataaaatgactgtgcttgttcgtaacagatgcaaacaagaaagaagaactgggaagtctttgtccctaggaaatccaaaggggctggaatatggtgttggtttggctttctggttggcccaatcggcctattggctcaatgggaagagaggagagggagaaaaataaaatgaaaggaaaaaaaaaagtttgcaaattcagacaggaaacaggtgagtggtttgaattggatgcagtgtgggccatcctggaatgatactgactgattaattattcctgataacatctcaagaaaaggagaaggaaagtgtttctggagaatgttctttcacatcactggaatctgcaattcaagaagtgacaagggagaattcttgctttacctatggactggcttaagccgtgtggcatccgaggaatgtttcaaatgtgtctgtgtttctctttacattccttgttgtacctcattgttcaattcacttttgtaaattccacctaacatttaattattttaaatttctccttttaccttaatctccttgctaattttatctgtctaattaaaaagagcagaagcatgtctgggtttacgtaaaaaaaaaaaaaaaaaa

SEQ ID NO: 56 - protein, 984 aa, Homo sapiens
MALDYLLLLLLASAVAAMEETLMDTRTATAELGWTANPASGWEEVSGYDENLNTIRTYQVCNVFEPNQNNWLLTTFINRRGAHRIYTEMRFTVRDCSSLPNVPGSCKETFNLYYYETDSVIATKKSAFWSEAPYLKVDTIAADESFSQVDFGGRLMKVNTEVRSFGPLTRNGFYLAFQDYGACMSLLSVRVFFKKCPSIVQNFAVFPETMTGAESTSLVIARGTCIPNAEEVDVPIKLYCNGDGEWMVPIGRCTCKPGYEPENSVACKACPAGTFKASQEAEGCSHCPSNSRSPAEASPICTCRTGYYRADFDPPEVACTSVPSGPRNVISIVNETSIILEWHPPRETGGRDDVTYNIICKKCRADRRSCSRCDDNVEFVPRQLGLTECRVSISSLWAHTPYTFDIQAINGVSSKSPFPPQHVSVNITTNQAAPSTVPIMHQVSATMRSITLSWPQPEQPNGIILDYEIRYYEKEHNEFNSSMARSQTNTARIDGLRPGMVYVVQVRARTVAGYGKFSGKMCFQTLTDDDYKSELREQLPLIAGSAAAGVVFVVSLVAISIVCSRKRAYSKEAVYSDKLQHYSTGRGSPGMKIYIDPFTYEDPNEAVREFAKEIDVSFVKIEEVIGAGEFGEVYKGRLKLPGKREIYVAIKTLKAGYSEKQRRDFLSEASIMGQFDHPNIIRLEGVVTKSRPVMIITEFMENGALDSFLRQNDGQFTVIQLVGMLRGIAAGMKYLAEMNYVHRDLAARNILVNSNLVCKVSDFGLSRYLQDDTSDPTYTSSLGGKIPVRWTAPEAIAYRKFTSASDVWSYGIVMWEVMSFGERPYWDMSNQDVINAIEQDYRLPPPMDCPAALHQLMLDCWQKDRNSRPRFAEIVNTLDKMIRNPASLKTVATITAVPSQPLLDRSIPDFTAFTTVDDWLSAIKMVQYRDSFLTAGFTSLQLVTQMTSEDLLRIGITLAGHQKKILNSIHSMRVQISQSPTAMA

SEQ ID NO: 57 - DNA, 2753 bp, Homo sapiens
  CDS (67)..(2457)
agaatttggactcatatcaagatgctctgaagaagaacaaccctttaggatagccactgcaacatcatgaccaaagacaaagaacctattgttaaaagcttccattttgtttgccttatgatcataatagttggaaccagaatccagttctccgacggaaatgaatttgcagtagacaagtcaaaaagaggtcttattcatgttccaaaagacctaccgctgaaaaccaaagtcttagatatgtctcagaactacatcgctgagcttcaggtctctgacatgagctttctatcagagttgacagttttgagactttcccataacagaatccagctacttgatttaagtgttttcaagttcaaccaggatttagaatatttggatttatctcataatcagttgcaaaagatatcctgccatcctattgtgagtttcaggcatttagatctctcattcaatgatttcaaggccctgcccatctgtaaggaatttggcaacttatcacaactgaatttcttgggattgagtgctatgaagctgcaaaaattagatttgctgccaattgctcacttgcatctaagttatatccttctggatttaagaaattattatataaaagaaaatgagacagaaagtctacaaattctgaatgcaaaaacccttcaccttgtttttcacccaactagtttattcgctatccaagtgaacatatcagttaatactttagggtgcttacaactgactaatattaaattgaatgatgacaactgtcaagttttcattaaatttttatcagaactcaccagaggttcaaccttactgaattttaccctcaaccacatagaaacgacttggaaatgcctggtcagagtctttcaatttctttggcccaaacctgtggaatatctcaatatttacaatttaacaataattgaaagcattcgtgaagaagattttacttattctaaaacgacattgaaagcattgacaatagaacatatcacgaaccaagtttttctgttttcacagacagctttgtacaccgtgttttctgagatgaacattatgatgttaaccatttcagatacaccttttatacacatgctgtgtcctcatgcaccaagcacattcaagtttttgaactttacccagaacgttttcacagatagtatttttgaaaaatgttccacgttagttaaattggagacacttatcttacaaaaaaatggattaaaagaccttttcaaagtaggtctcatgacgaaggatatgccttctttggaaatactggatgttagctggaattctttggaatctggtagacataaagaaaactgcacttgggttgagagtatagtggtgttaaatttgtcttcaaatatgcttactgactctgttttcagatgtttacctcccaggatcaaggtacttgatcttcacagcaataaaataaagagcgttcctaaacaagtcgtaaaactggaagctttgcaagaactcaatgttgctttcaattctttaactgaccttcctggatgtggcagctttagcagcctttctgtattgatcattgatcacaattcagtttcccacccatcggctgatttcttccagagctgccagaagatgaggtcaataaaagcaggggacaatccattccaatgtacctgtgagctaagagaatttgtcaaaaatatagaccaagtatcaagtgaagtgttagagggctggcctgattcttataagtgtgactacccagaaagttatagaggaagcccactaaaggactttcacatgtctgaattatcctgcaacataactctgctgatcgtcaccatcggtgccaccatgctggtgttggctgtgactgtgacctccctctgcatctacttggatctgccctggtatctcaggatggtgtgccagtggacccagactcggcgcagggccaggaacatacccttagaagaactccaaagaaacctccagtttcatgcttttatttcatatagtgaacatgattctgcctgggtgaaaagtgaattggtaccttacctagaaaaagaagatatacagatttgtcttcatgagaggaactttgtccctggcaagagcattgtggaaaatatcatcaactgcattgagaagagttacaagtccatctttgttttgtctcccaactttgtccagagtgagtggtgccattacgaactctattttgcccatcacaatctctttcatgaaggatctaataacttaatcctcatcttactggaacccattccacagaacagcattcccaacaagtaccacaagctgaaggctctcatgacgcagcggacttatttgcagtggcccaaggagaaaagcaaacgtgggctcttttgggctaacattagagccgcttttaatatgaaattaacactagtcactgaaaacaatgatgtgaaatcttaaaaaaatttaggaaattcaacttaagaaaccattatttacttggatgatggtgaatagtacagtcgtaagtaactgtctggaggtgcctccattatcctcatgccttcaggaaagacttaacaaaaacaatgtttcatctggggaactgagctaggcggtgaggttagcctgccagttagagacagcccagtctcttctggtttaatcattatgtttcaaattgaaacagtctcttttgagtaaatgctcagtttttcagctcctctccactctgctttcccaaatggattctgttg

SEQ ID NO: 58 - protein, 796 aa, Homo sapiens
MTKDKEPIVKSFHFVCLMIIIVGTRIQFSDGNEFAVDKSKRGLIHVPKDLPLKTKVLDMSQNYIAELQVSDMSFLSELTVLRLSHNRIQLLDLSVFKFNQDLEYLDLSHNQLQKISCHPIVSFRHLDLSFNDFKALPICKEFGNLSQLNFLGLSAMKLQKLDLLPIAHLHLSYILLDLRNYYIKENETESLQILNAKTLHLVFHPTSLFAIQVNISVNTLGCLQLTNIKLNDDNCQVFIKFLSELTRGSTLLNFTLNHIETTWKCLVRVFQFLWPKPVEYLNIYNLTIIESIREEDFTYSKTTLKALTIEHITNQVFLFSQTALYTVFSEMNIMMLTISDTPFIHMLCPHAPSTFKFLNFTQNVFTDSIFEKCSTLVKLETLILQKNGLKDLFKVGLMTKDMPSLEILDVSWNSLESGRHKENCTWVESIVVLNLSSNMLTDSVFRCLPPRIKVLDLHSNKIKSVPKQVVKLEALQELNVAFNSLTDLPGCGSFSSLSVLIIDHNSVSHPSADFFQSCQKMRSIKAGDNPFQCTCELREFVKNIDQVSSEVLEGWPDSYKCDYPESYRGSPLKDFHMSELSCNITLLIVTIGATMLVLAVTVTSLCIYLDLPWYLRMVCQWTQTRRRARNIPLEELQRNLQFHAFISYSEHDSAWVKSELVPYLEKEDIQICLHERNFVPGKSIVENIINCIEKSYKSIFVLSPNFVQSEWCHYELYFAHHNLFHEGSNNLILILLEPIPQNSIPNKYHKLKALMTQRTYLQWPKEKSKRGLFWANIRAAFNMKLTLVTENNDVKS

SEQ ID NO: 59 - DNA, 6369 bp, Homo sapiens
  CDS (107)..(5623)
cccacgcgtccggccttggcggcggacgtgcagagaatctcgatgctggcctggagcagaaactgagctggaccactggagcctcggtgagggggtgcggggggcaatggcactgcagctctgggccctgaccctgctgggcctgctgggcgcaggtgccagcctgaggccccgcaagctggacttcttccgcagcgagaaagagctgaaccacctggctgtggatgaggcctcaggcgtggtgtacctgggggcggtgaatgccctctaccagctggatgcgaagctgcagctggagcagcaggtggccacgggcccggccctggacaacaagaagtgcacgccgcccatcgaggccagccagtgccatgaggctgagatgactgacaatgtcaaccagctgctgctgctcgaccctcccaggaagcgcctggtggagtgcggcagcctcttcaagggcatctgcgctctgcgcgccctgagcaacatctccctccgcctgttctacgaggacggcagcggggagaagtctttcgtggccagcaatgatgagggcgtggccacagtggggctggtgagctccacgggtcctggtggtgaccgcgtgctgtttgtgggcaaaggcaatgggccacacgacaacggcatcatcgtgagcactcggctgttggaccggactgacagcagggaggcctttgaagcctacacggaccacgccacctacaaggccggctacctgtccaccaacacacagcagttcgtggcggccttcgaggacggcccctacgtcttctttgtcttcaaccagcaggacaagcacccggcccggaaccgcacgctgctggcacgcatgtgcagagaagaccccaactactactcctacctggagatggacctgcagtgccgggaccccgacatccacgccgctgcctttggcacctgcctggccgcctccgtggctgcgcctggctctggcagggtgctatatgctgtcttcagcagagacagccggagcagtggggggcccggtgcgggcctctgcctgttcccgctggacaaggtgcacgccaagatggaggccaaccgcaacgcctgttacacaggcacccgggaggcccgtgacatcttctacaagcccttccacggcgatatccagtgcggcggccacgcgccgggctccagcaagagcttcccatgtggctcggagcacctgccctacccgctgggcagccgcgacgggctcagaggcacagccgtgctgcagcgtggaggcctgaacctcacggccgtgacggtcgccgccgagaacaaccacactgttgcttttctgggcacctctgatggccggatcctcaaggtgtacctcaccccagatggcacctcctcagagtacgactctatccttgtggagataaacaagagagtcaagcgcgacctggtactgtctggagacctgggcagcctgtacgccatgacccaggacaaggtgttccggctgccggtgcaggagtgcctgagctacccgacctgcacccagtgccgcgactcccaggacccctactgcggctggtgcgtcgtcgagggacgatgcacccggaaggccgagtgtccgcgggccgaggaggccagccactggctgtggagccgaagcaagtcctgcgtggccgtcaccagcgcccagccacagaacatgagccggcgggcccagggggaggtgcagctgaccgtcagccccctccctgccctgagcgaggaggacgagttgctgtgcctttttggggagtcgccgccacaccccgcccgcgtggagggcgaggccgtcatctgcaactccccaagcagcatccccgtcacaccgccaggccaggaccacgtggccgtgaccatccagctcctccttagacgaggcaacatcttcctcacgtcctaccagtaccccttctacgactgccgccaggccatgagcctggaggagaacctgccgtgcatctcctgcgtgagcaaccgctggacctgccagtgggacctgcgctaccacgagtgccgggaggcttcgcccaaccctgaggacggcatcgtccgtgcccacatggaggacagctgtccccagttcctgggacccagccccctggtgatccccatgaaccacgagacagatgtgaacttccagggcaagaacctggacaccgtgaagggttcctccctgcacgtgggcagtgacttgctcaagttcatggagccggtgaccatgcaggaatctgggaccttcgcctttcggaccccaaagctgtcccacgatgccaacgagacgctgcccctgcacctctacgtcaagtcttacggcaagaatatcgacagcaagctccatgtgaccctctacaactgctcctttggccgcagcgactgcagcctgtgccgggccgctaaccccgactacaggtgtgcgtggtgcgggggccagagcaggtgcgtgtatgaggccctgtgcaacaccacctccgagtgcccgccgcccgtcatcaccaggatccagcctgagacgggccccctgggtgggggcatccgcatcaccatcctggggtccaatttgggcgtccaagcaggggacatccagaggatctctgtggccggccggaactgctcctttcagccggaacgttactccgtgtccacccggatcgtgtgtgtgatcgaggctgcggagacgcctttcacggggggtgtcgaggtggacgtcttcgggaaactgggccgttcgcctcccaatgtccagttcaccttccaacagcccaagcctctcagtgtggagccgcagcagggaccgcaggcgggcggcaccacactgaccatccacggcacccacctggacacgggctcccaggaggacgtgcgggtgaccctcaacggcgtcccgtgtaaagtgacgaagtttggggcgcagctccagtgtgtcactggcccccaggcgacacggggccagatgcttctggaggtctcctacggggggtcccccgtgcccaaccccggcatcttcttcacctaccgcgaaaaccccgtactgcgagccttcgagccgctacgaagctttgccagtggtggccgcagcatcaacgtcacgggtcagggcttcagcctgatccagaggtttgccatggtggtcatcgcggagcccctgcagtcctggcagccgccgcgggaggctgaatccctgcagcccatgacggtggtgggtacagactacgtgttccacaatgacaccaaggtcgtcttcctgtccccggctgtgcctgaggagccagaggcctacaacctcacggtgctgatcgagatggacgggcaccgtgccctgctcagaacagaggccggggccttcgagtacgtgcctgaccccacctttgagaacttcacaggtggcgtcaagaagcaggtcaacaagctcatccacgcccggggcaccaatctgaacaaggcgatgacgctgcaggaggccgaggccttcgtgggtgccgagcgctgcaccatgaagacgctgacggagaccgacctgtactgtgagcccccggaggtgcagcccccgcccaagcggcggcagaaacgagacaccacacacaacctgcccgagttcattgtgaagttcggctctcgcgagtgggtgctgggccgcgtggagtacgacacacgggtgagcgacgtgccgctcagcctcatcttgccgctggtcatcgtgcccatggtggtcgtcatcgcggtgtctgtctactgctactggaggaagagccagcaggccgaacgagagtatgagaagatcaagtcccagctggagggcctggaggagagcgtgcgggaccgctgcaagaaggaattcacagacctgatgatcgagatggaggaccagaccaacgacgtgcacgaggccggcatccccgtgctggactacaagacctacaccgaccgcgtcttcttcctgccctccaaggacggcgacaaggacgtgatgatcaccggcaagctggacatccctgagccgcggcggccggtggtggagcaggccctctaccagttctccaacctgctgaacagcaagtctttcctcatcaatttcatccacaccctggagaaccagcgggagttctcggcccgcgccaaggtctacttcgcgtccctgctgacggtggcgctgcacgggaaactggagtactacacggacatcatgcacacgctcttcctggagctcctggagcagtacgtggtggccaagaaccccaagctgatgctgcgcaggtctgagactgtggtggagaggatgctgtccaactggatgtccatctgcctgtaccagtacctcaaggacagtgccggggagcccctgtacaagctcttcaaggccatcaaacatcaggtggaaaagggcccggtggatgcggtacagaagaaggccaagtacactctcaacgacacggggctgctgggggatgatgtggagtacgcacccctgacggtgagcgtgatcgtgcaggacgagggagtggacgccatcccggtgaaggtcctcaactgtgacaccatctcccaggtcaaggagaagatcattgaccaggtgtaccgtgggcagccctgctcctgctggcccaggccagacagcgtggtcctggagtggcgtccgggctccacagcgcagatcctgtcggacctggacctgacgtcacagcgggagggccggtggaagcgcgtcaacacccttatgcactacaatgtccgggatggagccaccctcatcctgtccaaggtgggggtctcccagcagccggaggacagccagcaggacctgcctggggagcgccatgccctcctggaggaggagaaccgggtgtggcacctggtgcggccgaccgacgaggtggacgagggcaagtccaagagaggcagcgtgaaagagaaggagcggacgaaggccatcaccgagatctacctgacgcggctgctctcagtcaagggcacactgcagcagtttgtggacaacttcttccagagcgtgctggcgcctgggcacgcggtgccacctgcagtcaagtacttcttcgacttcctggacgagcaggcagagaagcacaacatccaggatgaagacaccatccacatctggaagacgaacagcttaccgctccggttctgggtgaacatcctcaagaacccccacttcatctttgacgtgcatgtccacgaggtggtggacgcctcgctgtcagtcatcgcgcagaccttcatggatgcctgcacgcgcacggagcataagctgagccgcgattctcccagcaacaagctgctgtacgccaaggagatctccacctacaagaagatggtggaggattactacaaggggatccggcagatggtgcaggtcagcgaccaggacatgaacacacacctggcagagatttcccgggcgcacacggactccttgaacaccctcgtggcactccaccagctctaccaatacacgcagaagtactatgacgagatcatcaatgccttggaggaggatcctgccgcccagaagatgcagctggccttccgcctgcagcagattgccgctgcactggagaacaaggtcactgacctctgacctacaatctccagtgctgccttgggacataggtacctgaggtacctgagagcccctcaggggaggaggccgagtggctgtggctgaggcccccaccctcccctggaacgcgccccaagccggagtgggtgcagccggaacccgcccagcgtctagactgtagcatcttcctctgagcaataccgccgggcaccgcaccagcaccagccccagccccagctccctccggccgcagaaccagcatcgggtgttcactgtcgagtctccagtgatttgaaaatgtgccttacgctgccacgctgggggcagctggcctccgcctccgcccacgcaccagcagccgcctccatgccctaggttgggcccctgggggatctgagggcctgtggcccccagggcaagttcccagatcctatgtctgtctgtccaccacgagatgggaggaggagaaaaagcggtacgatgccttcctgacctcaccggcctccccaagggtgccggcactctgggtggactcacggctgctgggccccacgtcaaaggtcaagtgagacgtaggtcaagtcctacgtcggggcccagacatcctggggtcctggtctgtcagacaggctgccctagagccccacccagtccggggggactgggagcagttccaagaccaccccacccctttttgtaaatcttgttcattgtaaatcaaatacagcgtctttttcactctgaaaaaaaaaaaaaaaaaaaaa

SEQ ID NO: 60 - protein, 1838 aa, Homo sapiens
MALQLWALTLLGLLGAGASLRPRKLDFFRSEKELNHLAVDEASGVVYLGAVNALYQLDAKLQLEQQVATGPALDNKKCTPPIEASQCHEAEMTDNVNQLLLLDPPRKRLVECGSLFKGICALRALSNISLRLFYEDGSGEKSFVASNDEGVATVGLVSSTGPGGDRVLFVGKGNGPHDNGIIVSTRLLDRTDSREAFEAYTDHATYKAGYLSTNTQQFVAAFEDGPYVFFVFNQQDKHPARNRTLLARMCREDPNYYSYLEMDLQCRDPDIHAAAFGTCLAASVAAPGSGRVLYAVFSRDSRSSGGPGAGLCLFPLDKVHAKMEANRNACYTGTREARDIFYKPFHGDIQCGGHAPGSSKSFPCGSEHLPYPLGSRDGLRGTAVLQRGGLNLTAVTVAAENNHTVAFLGTSDGRILKVYLTPDGTSSEYDSILVEINKRVKRDLVLSGDLGSLYAMTQDKVFRLPVQECLSYPTCTQCRDSQDPYCGWCVVEGRCTRKAECPRAEEASHWLWSRSKSCVAVTSAQPQNMSRRAQGEVQLTVSPLPALSEEDELLCLFGESPPHPARVEGEAVICNSPSSIPVTPPGQDHVAVTIQLLLRRGNIFLTSYQYPFYDCRQAMSLEENLPCISCVSNRWTCQWDLRYHECREASPNPEDGIVRAHMEDSCPQFLGPSPLVIPMNHETDVNFQGKNLDTVKGSSLHVGSDLLKFMEPVTMQESGTFAFRTPKLSHDANETLPLHLYVKSYGKNIDSKLHVTLYNCSFGRSDCSLCRAANPDYRCAWCGGQSRCVYEALCNTTSECPPPVITRIQPETGPLGGGIRITILGSNLGVQAGDIQRISVAGRNCSFQPERYSVSTRIVCVIEAAETPFTGGVEVDVFGKLGRSPPNVQFTFQQPKPLSVEPQQGPQAGGTTLTIHGTHLDTGSQEDVRVTLNGVPCKVTKFGAQLQCVTGPQATRGQMLLEVSYGGSPVPNPGIFFTYRENPVLRAFEPLRSFASGGRSINVTGQGFSLIQRFAMVVIAEPLQSWQPPREAESLQPMTVVGTDYVFHNDTKVVFLSPAVPEEPEAYNLTVLIEMDGHRALLRTEAGAFEYVPDPTFENFTGGVKKQVNKLIHARGTNLNKAMTLQEAEAFVGAERCTMKTLTETDLYCEPPEVQPPPKRRQKRDTTHNLPEFIVKFGSREWVLGRVEYDTRVSDVPLSLILPLVIVPMVVVIAVSVYCYWRKSQQAEREYEKIKSQLEGLEESVRDRCKKEFTDLMIEMEDQTNDVHEAGIPVLDYKTYTDRVFFLPSKDGDKDVMITGKLDIPEPRRPVVEQALYQFSNLLNSKSFLINFIHTLENQREFSARAKVYFASLLTVALHGKLEYYTDIMHTLFLELLEQYVVAKNPKLMLRRSETVVERMLSNWMSICLYQYLKDSAGEPLYKLFKAIKHQVEKGPVDAVQKKAKYTLNDTGLLGDDVEYAPLTVSVIVQDEGVDAIPVKVLNCDTISQVKEKIIDQVYRGQPCSCWPRPDSVVLEWRPGSTAQILSDLDLTSQREGRWKRVNTLMHYNVRDGATLILSKVGVSQQPEDSQQDLPGERHALLEEENRVWHLVRPTDEVDEGKSKRGSVKEKERTKAITEIYLTRLLSVKGTLQQFVDNFFQSVLAPGHAVPPAVKYFFDFLDEQAEKHNIQDEDTIHIWKTNSLPLRFWVNILKNPHFIFDVHVHEVVDASLSVIAQTFMDACTRTEHKLSRDSPSNKLLYAKEISTYKKMVEDYYKGIRQMVQVSDQDMNTHLAEISRAHTDSLNTLVALHQLYQYTQKYYDEIINALEEDPAAQKMQLAFRLQQIAAALENKVTDL

SEQ ID NO: 61 - DNA, 10088 bp, Homo sapiens
  CDS (143)..(4984)
gtgcccctttctttcttctctcgctgggaagctgggaagtatgagcgtgcagccctgccgctgcggcggccgccccggctcctcgcctcccccacttctggccacccctcgccggtgagagaagagaacgcgagaagggaagatgggggccgtcctgaggagcctcctggcctgcagcttctgtgtgctcctgagagcggcccctttgttgctttatgcaaacagacgggacttgcgattggttgatgctacaaatggcaaagagaatgctacgattgtagttggaggcttggaggatgcagctgcggtggactttgtgtttagtcatggcttgatatactggagtgatgtcagcgaagaagccattaaacgaacagaatttaacaaaactgagagtgtgcagaatgttgttgtttctggattattgtcccccgatgggctggcatgtgattggcttggagaaaaattgtactggacagattctgaaactaatcggattgaagtttctaatttagatggatctttacgaaaagttttattttggcaagagttggatcaacccagagctattgccttagatccttcaagtgggttcatgtactggacagactggggagaagtgccaaagatagaacgtgctggaatggatggttcaagtcgcttcattataataaacagtgaaatttactggccaaatggactgactttggattatgaagaacaaaagctttattgggcagatgcaaaacttaatttcatccacaaatcaaatctggatggaacaaatcggcaggcagtggttaaaggttcccttccacatccttttgccttgacgttatttgaggacatattgtactggactgactggagcacacactccattttggcttgcaacaagtatactggtgagggtctgcgtgaaatccattctgacatcttctctcccatggatatacatgccttcagccaacagaggcagccaaatgccacaaatccatgtggaattgacaatgggggttgttcccatttgtgtttgatgtctccagtcaagcctttttatcagtgtgcttgccccactggggtcaaactcctggagaatggaaaaacctgcaaagatggtgccacagaattattgcttttagctcgaaggacagacttgagacgcatttctttggatacaccagattttacagacattgttctgcagttagaagacatccgtcatgccattgccatagattacgatcctgtggaaggctacatctactggactgatgatgaagtgagggccatacgccgttcatttatagatggatctggcagtcagtttgtggtcactgctcaaattgcccatcctgatggtattgctgtggactgggttgcacgaaatctttattggacagacactggcactgatcgaatagaagtgacaaggctcaatgggaccatgaggaagatcttgatttcagaggacttagaggaaccccgggctattgtgttagatcccatggttgggtacatgtattggactgactggggagaaattccgaaaattgagcgagcagctctggatggttctgaccgtgtagtattggttaacacttctcttggttggccaaatggtttagccttggattatgatgaaggcaaaatatactggggagatgccaaaacagacaagattgaggttatgaatactgatggcactgggagacgagtactagtggaagacaaaattcctcacatatttggatttactttgttgggtgactatgtttactggactgactggcagaggcgtagcattgaaagagttcataaacgaagtgcagagagggaagtgatcatagatcagctgcctgacctcatgggcctaaaggctacaaatgttcatcgagtgattggttccaacccctgtgctgaggaaaacgggggatgtagccatctctgcctctatagacctcagggccttcgctgtgcttgccctattggctttgaactcatcagtgacatgaagacctgcattgtcccagaggctttccttttgttttcacggagagcagatatcagacgaatttctctggaaacaaacaataataatgtggctattccactcactggtgtcaaagaagcttctgctttggattttgatgtgacagacaaccgaatttattggactgatatatcactcaagaccatcagcagagcctttatgaatggcagtgcactggaacatgtggtagaattcggcttagattatccagaaggcatggcagtagactggcttgggaagaacttgtactgggcagacacaggaacgaatcgaattgaggtgtcaaagttggatgggcagcaccgacaagttttggtgtggaaagacctagatagtcccagagctctcgcgttggaccctgccgaaggatttatgtattggactgaatggggtggaaaacctaagatagacagagctgcaatggatggaagtgaacgtactaccttagttccaaatgtggggcgggcaaacggcctaactattgattatgctaaaaggaggctttattggacagacctggacaccaacttaatagaatcttcaaatatgcttgggctcaaccgtgaagttatagcagatgacttgcctcatccttttggcttaactcagtaccaagattatatctactggacggactggagccgacgcagcattgagcgtgccaacaaaaccagtggccaaaaccgcaccatcattcagggccatttggattatgtgatggacatcctcgtctttcactcatctcgacagtcagggtggaatgaatgtgcttccagcaatgggcactgctcccacctctgcttggctgtgccagttgggggttttgtttgtggatgccctgcccactactctcttaatgctgacaacaggacttgtagtgctcctacgactttcctgctcttcagtcaaaagagtgccatcaaccgcatggtgattgatgaacaacagagccccgacatcatccttcccatccacagccttcggaatgtccgggccattgactatgacccactggacaagcaactctattggattgactcacgacaaaacatgatccgaaaggcacaagaagatggcagccagggctttactgtggttgtgagctcagttccgagtcagaacctggaaatacaaccctatgacctcagcattgatatttacagccgctacatctactggacttgtgaggctaccaatgtcattaatgtgacaagattagatgggagatcagttggagtggtgctgaaaggcgagcaggacagacctcgagccgttgtggtaaacccagagaaagggtatatgtattttaccaatcttcaggaaaggtctcctaaaattgaacgggctgctttggatgggacagaacgggaggtcctctttttcagtggcttaagtaaaccaattgctttagcccttgatagcaggctgggcaagctcttttgggctgattcagatctccggcgaattgaaagcagtgatctctcaggtgctaaccggatagtattagaagactccaatatcttgcagcctgtgggacttactgtgtttgaaaactggctctattggattgataaacagcagcaaatgattgaaaaaattgacatgacaggtcgagagggtagaaccaaagtccaagctcgaattgcccagcttagtgacattcatgcagtaaaggagctgaaccttcaagaatacagacagcacccttgtgctcaggataatggtggctgttcacatatttgtcttgtaaagggggatggtactacaaggtgttcttgccccatgcacctggttctacttcaagatgagctatcatgtggagaacctccaacatgttctcctcagcagtttacttgtttcacgggggaaattgactgtatccctgtggcttggcggtgcgatgggtttactgaatgtgaagaccacagtgatgaactcaattgtcctgtatgctcagagtcccagttccagtgtgccagtgggcagtgtattgatggtgccctccgatgcaatggagatgcaaactgccaggacaaatcagatgagaagaactgtgaagtgctttgtttaattgatcagttccgctgtgccaatggtcagtgcattggaaagcacaagaagtgtgatcataatgtggattgcagtgacaagtcagatgaactggattgttatccgactgaagaaccagcaccacaggccaccaatacagttggttctgttattggcgtaattgtcaccatttttgtgtctggaactgtatactttatctgccagaggatgttgtgtccacgtatgaagggagatggggaaactatgactaatgactatgtagttcatggaccagcttctgtgcctcttggttatgtgccacacccaagttctttgtcaggatctcttccaggaatgtctcgaggtaaatcaatgatcagctccctcagtatcatggggggaagcagtggacccccctatgaccgagcccatgttacaggagcatcatcaagtagttcttcaagcaccaaaggcacttacttccctgcaattttgaaccctccaccatccccagccacagagcgatcacattacactatggaatttggatattcttcaaacagtccttccactcataggtcatacagctacaggccatatagctaccggcactttgcaccccccaccacaccctgcagcacagatgtttgtgacagtgactatgctcctagtcggagaatgacctcagtggcaacagccaagggctataccagtgacttgaactatgattcagaacctgtgcccccacctcccacaccccgaagccaatacttgtcagcagaggagaactatgaaagctgcccaccttctccatacacagagaggagctattctcatcacctctacccaccgccaccctctccctgtacagactcctcctgaggaggggccctcctcctctgactgcctccaacgtaaaaatgtaaatataaatttggttgagatctggagggggggagggagctattagagaaggatgaggcagaccatgtacagttaaaattataaaatggggtagggaatactggagatatttgtacagaagaaaaggatatttatatattttcttaaaacagcagatttgctgcttgtgccataaaagtttgtataaaaaaaatttgtactaaaagttttatttttgcaaactaaatacacaaagcatgccttaaacccagtgaagcaactgagtacaaaggaaacaggaataataaaggcatcactgaccaggaatatctgggctttattgataccaaaaataaaaaagaggaagaagaaaaattaagtccatctcagagcagcaaaccatagatacatggatgtagccagatagccttcagttaactaacatttgagggccaacaagtaagaaatgatgaaaggaaaaaaatgcaattaatactaaccttggacgaagggctttgttttctctaggaatccaacagtgctagtgaggaaagtagatatttctaaaaacccattctgggtgttgctgttgtaggagagatcagccctctggtaagatgccatgaagctgtgtgtgtgtgcaagtctctgtccctacctttagaatccatacctctgtcaaaatgaatttttttctctaggtatgtttaccttgctgcctcctccagcaacttggtaagtcattttgctaagataccatgatttttttaagctgaagcattgactaaatggaattttctaaattaaacttgattttaatatttcttctagctccattccccagtaggcttagctcttcaatttgactgctgtttttgcataatgatcaaaagttagacatattatttctcttcttccaagattgttttaatgctcattaaaatgtctttttacaacacatatagacaatgtttaagaattaaaaatttaaccattatgtttttgttgtaaatctcatatccttgcactactttcagcatatatcacagtacgaaatcatttatatatatatatatatatatatatatatatatatatatatatatatatatattttgtttgtttgtttgttttctgagtaaaacatttaaatatgttctggttagagacaatctatttaaaaagatttttttcttattaggattttccctatattaacagtttgtgatgttttcatgttctttagaccggtttttctcagaataatgtctacatacatacctcttctaatgtgtgacatgaatttaatatctttctgttacccactgtgaatgttaggctgttttcaaattatccacaaattattcttgtaatcacccaatatttttatgtgggtcctctcttacccattatggattaagatagtttaacaaatttaacaatgaggattaaatgagaaggcaaactgttaacttctcagctgtcagaatttgggtggaagggaataatggaagcctcttttgtgatctgcctgacctgctgtcatgtatggtactggggctgctacatcttgagctatcagggctgacctgtggaatgattctagcacttgctctgccaccttgccagaagttcgtttcctgctttttacacatgtgtagcacttctctgctaaaattgaatggttttaaactaatgtatttttagcttaagaggtgttggtcagttaattattgaattttttttttttcttttttaattctgtcttgccaaggcctctctgggtttcagggcccaagagaaaacagtggaagaaaggattcagaatttgggcaagggtgaagtaactgttcatgcaagttaaaaatacctaagtaaagtttttgaagataaaattgtggtttcagaataatgctgattgttggagactgtaagaatcaggtgcacttgattttgcatataagcaaatggtaaatctatcagaatcctaaaacagacaagcatgaactcttcccattgctggaactaagtgcccacagtgtcagacaaaatggacattgaacttggattctgtgatacacagggcacttgatgcttaaatgaagatggaaaggttagcaatacctgggtgtcagttagaatttgagaattctatatgtttacatatttaaatgtgcatcttgatctggtgggcttcccatgtggagacttgcactctaattaactaagaagaatattgccttgttggatctcagtccacgtgcttgcactgcgatggcaatggcctcttcttcaaaatactaatttgtgtgccaatttgtttaaaattatttgaaggcagttcagcctaatctcagtgttctctttctggggtagatgagatggattcttaatatttctgggagtactttttaatgagagaattgtcaaatttggaaagatttattgagccttaggttacatggacagttaagcttaagtaaactgtatattgattatcaaacacaagctgtaattggaaaagttgagaggaaaagcatgagatcacaaattagggggaaaaaagaaaagggatttttaaatttggtgtattaaattcattgtccaagggggaaaatgaataatgtttcattagattccttatatgcaaaagtatttattttgaacatgtgtcctaaaatatatgcactaactgatgtgattaaaattgtccaagaaataaacttgagcataacatactttgtgtgcaccacagtaagctattctgcattgaagtggtcttttataactaaggcctggactttgctccaacagagtcgtggtcttctgaatagtgacttaaggagttttgtttgcttaagtcagataatagcacattcacagggaaacaaagagagttggtggatagaattttctgactattaatttttcttccatgaaattttattatgcctttggcactttctgccactcttacagcatatcacaagatatctgtttagcagaagattatgtagttactttaattttaatataaaagtagcttgtgatacattaccaagagatctctgattctttagtaagtttgagaacacctattctacagagatgataggtacttagaaatgaagactttaaagtacattttaatctaatataggccagtaattgggggaaggggctttgagcagtacaattttaagatgattttgagggttgtatttctttatcatttaaaaatatcctaaagtcagtaatttatatgaaggaaactcattcattattgaaggtattaaaaatagccatcatctgtattaggtagcagttttggaggatcatctttttcttttgctataaagccctattaatgaagaatacttccagtagagttaatagctgtagcttacctagtgtgttaatgaagtgtgtttatttatgtgacttgataccagtagtcataatagagactgaagaggtatgcgttaagcacgcctacttctatgcagtaaacaggctgcagctgcctagattagattcttagaaatgtcatattttgaattgttttatttcttgtaggggaagctttgtcccacttcattcatttgcatgccataggaattacatattggttatcattacgtatctaacaagattcagaaacaaaaatcttggacttttcacatccgaaatatgtcagctcttaataaatgtgtggtgcttaagtctacatatggcatccatagttgatttagagtatggatatgagtgtgttgaccagttatcagtaggtggacaaatatttgggcatctacagatgagactatgcactaagtgtggactgagtcctaaagaagcttatagtcaggtgttgtttaaaacattatcagaattcttaaacccaaggaatttaattttatttggtatttcttaagcctaaaatgaaccaagagaaagatgattttagaaagtacttgtagtgaaagatgattttagaaagtacttgtagtgcatgtgtggcttctgacttttgggatggcaccattttataatagtttcaaaatttagcttttgaaattctcaacattttatggtagaagactttggacctcaagtataaaattatacgtttataatttttttaaaatttaaattataagtattgtgaattcacactctcaggctattgtctgacttgatctacgtctcataaagcctgtacctgagtggagtggaaggtggagtcttaggttaatcagttactgactctaccctcaccctctttcaattgaggtaaactttgctgtttttctttttcataaagcattctcaaattgttgagtttattgctgaaaaaaatctccatgactttacagatagaattacaaactaaatgatgtcttgtatttagaagcagagtacagacctaacgaactgttagattctccaccatcacttagggtttgcccagaagcaacaccagagaattacagacaacgcgcttttgctgaactgtccattttggtggttgtgtttttcagtcaaatataagcaggatgggcgatagagatatatttatatatagatacatattctatatatctaatgcctaaatatgggtattaaagggaaaatttttaaagtctgattaaatccaatatgacatgaaattaaatatatggattagtaaggaaaaatgttaaaaagtagagaggataccaagaagattaaactggactagccttatttgcaagtgaaggatctggtgctgctttcagatgtttatcttttatttttttcccttaagctttaatcttcgtcattgtcttaaagtcaactggtgtttcttgttcattgactttggtacgatggtgctttgcaaggatgtatttatgttataatggccaacatttggtcagcccttgtccacttattcacttccctccttttgtaaaataagtgctttaattataaactgtataaaaataccttgtataaaccccttttttgattattacaataaataagctgaattgtaacaaatgaaatttgatttttgtaataaaacagtggaaaagtaaaaaaa

SEQ ID NO: 62 - protein, 1613 aa, Homo sapiens
MGAVLRSLLACSFCVLLRAAPLLLYANRRDLRLVDATNGKENATIVVGGLEDAAAVDFVFSHGLIYWSDVSEEAIKRTEFNKTESVQNVVVSGLLSPDGLACDWLGEKLYWTDSETNRIEVSNLDGSLRKVLFWQELDQPRAIALDPSSGFMYWTDWGEVPKIERAGMDGSSRFIIINSEIYWPNGLTLDYEEQKLYWADAKLNFIHKSNLDGTNRQAVVKGSLPHPFALTLFEDILYWTDWSTHSILACNKYTGEGLREIHSDIFSPMDIHAFSQQRQPNATNPCGIDNGGCSHLCLMSPVKPFYQCACPTGVKLLENGKTCKDGATELLLLARRTDLRRISLDTPDFTDIVLQLEDIRHAIAIDYDPVEGYIYWTDDEVRAIRRSFIDGSGSQFVVTAQIAHPDGIAVDWVARNLYWTDTGTDRIEVTRLNGTMRKILISEDLEEPRAIVLDPMVGYMYWTDWGEIPKIERAALDGSDRVVLVNTSLGWPNGLALDYDEGKIYWGDAKTDKIEVMNTDGTGRRVLVEDKIPHIFGFTLLGDYVYWTDWQRRSIERVHKRSAEREVIIDQLPDLMGLKATNVHRVIGSNPCAEENGGCSHLCLYRPQGLRCACPIGFELISDMKTCIVPEAFLLFSRRADIRRISLETNNNNVAIPLTGVKEASALDFDVTDNRIYWTDISLKTISRAFMNGSALEHVVEFGLDYPEGMAVDWLGKNLYWADTGTNRIEVSKLDGQHRQVLVWKDLDSPRALALDPAEGFMYWTEWGGKPKIDRAAMDGSERTTLVPNVGRANGLTIDYAKRRLYWTDLDTNLIESSNMLGLNREVIADDLPHPFGLTQYQDYIYWTDWSRRSIERANKTSGQNRTIIQGHLDYVMDILVFHSSRQSGWNECASSNGHCSHLCLAVPVGGFVCGCPAHYSLNADNRTCSAPTTFLLFSQKSAINRMVIDEQQSPDIILPIHSLRNVRAIDYDPLDKQLYWIDSRQNMIRKAQEDGSQGFTVVVSSVPSQNLEIQPYDLSIDIYSRYIYWTCEATNVINVTRLDGRSVGVVLKGEQDRPRAVVVNPEKGYMYFTNLQERSPKIERAALDGTEREVLFFSGLSKPIALALDSRLGKLFWADSDLRRIESSDLSGANRIVLEDSNILQPVGLTVFENWLYWIDKQQQMIEKIDMTGREGRTKVQARIAQLSDIHAVKELNLQEYRQHPCAQDNGGCSHICLVKGDGTTRCSCPMHLVLLQDELSCGEPPTCSPQQFTCFTGEIDCIPVAWRCDGFTECEDHSDELNCPVCSESQFQCASGQCIDGALRCNGDANCQDKSDEKNCEVLCLIDQFRCANGQCIGKHKKCDHNVDCSDKSDELDCYPTEEPAPQATNTVGSVIGVIVTIFVSGTVYFICQRMLCPRMKGDGETMTNDYVVHGPASVPLGYVPHPSSLSGSLPGMSRGKSMISSLSIMGGSSGPPYDRAHVTGASSSSSSSTKGTYFPAILNPPPSPATERSHYTMEFGYSSNSPSTHRSYSYRPYSYRHFAPPTTPCSTDVCDSDYAPSRRMTSVATAKGYTSDLNYDSEPVPPPPTPRSQYLSAEENYESCPPSPYTERSYSHHLYPPPPSPCTDSS

SEQ ID NO: 63 - DNA, 1482 bp, Homo sapiens
  CDS (51)..(791)
gcgactgtctccgccgagcccccggggccaggtgtcccgggcgcgccacgatgcggccgcggctgtggctcctcttggccgcgcagctgacagttctccatggcaactcagtcctccagcagacccctgcatacataaaggtgcaaaccaacaagatggtgatgctgtcctgcgaggctaaaatctccctcagtaacatgcgcatctactggctgagacagcgccaggcaccgagcagtgacagtcaccacgagttcctggccctctgggattccgcaaaagggactatccacggtgaagaggtggaacaggagaagatagctgtgtttcgggatgcaagccggttcattctcaatctcacaagcgtgaagccggaagacagtggcatctacttctgcatgatcgtcgggagccccgagctgaccttcgggaagggaactcagctgagtgtggttgatttccttcccaccactgcccagcccaccaagaagtccaccctcaagaagagagtgtgccggttacccaggccagagacccagaagggcccactttgtagccccatcacccttggcctgctggtggctggcgtcctggttctgctggtttccctgggagtggccatccacctgtgctgccggcggaggagagcccggcttcgtttcatgaaacagaaattcaatatcgtttgcctgaaaataagtggtttcacaacttgctgttgttttcagattttacaaatgagcagagaatacggttttggtgtcctgctacaaaaagacatcggtcagtaacgagcacgatgtggaaaaatgagagaagggacacattcaaccctggagagttcaatggctgctgaagctgcctgcttttcactgctgcaaggcctttctgtgtgtgatgtgcatgggagcaacttgttcgtgggtcatcgggaatactagggagaaggtttcattgcccccagggcacttcacagagtgtgctggaggactgagtaagaaatgctgcccatgccaccgcttccggctcctgtgctttccctgaactgggacctttagtggtggccatttagccaccatctttgcaggttgctttgccctggtagggcagtaacattgggtcctgggtctttcatggggtgatgctgggctggctccctcttggtcttcccaggctggggctgaccttcctcgcagagaggccaggtgcaggttgggaatgaggcttgctgagaggggctgtccagttcccagaaggcatatcagtctctgagggcttcctttggggccgggaacttgcgggtttgaggataggagttcacttcatcttctcagctcccatttctactcttaagtttctcagctcccatttctactctcccatggcttaatgcttctttcattttctgtttgttttatacaaatgtcttagttgtacaaataaagtcccaggttaaagataacaaacggctcctgtgacata

SEQ ID NO: 64 - protein, 246 aa, Homo sapiens
MRPRLWLLLAAQLTVLHGNSVLQQTPAYIKVQTNKMVMLSCEAKISLSNMRIYWLRQRQAPSSDSHHEFLALWDSAKGTIHGEEVEQEKIAVFRDASRFILNLTSVKPEDSGIYFCMIVGSPELTFGKGTQLSVVDFLPTTAQPTKKSTLKKRVCRLPRPETQKGPLCSPITLGLLVAGVLVLLVSLGVAIHLCCRRRRARLRFMKQKFNIVCLKISGFTTCCCFQILQMSREYGFGVLLQKDIGQ

SEQ ID NO: 65 - DNA, 1065 bp, Homo sapiens
  CDS (51)..(782)
gcgactgtctccgccgagcccccggggccaggtgtcccgggcgcgccacgatgcggccgcggctgtggctcctcttggccgcgcagctgacagttctccatggcaactcagtcctccagcagacccctgcatacataaaggtgcaaaccaacaagatggtgatgctgtcctgcgaggctaaaatctccctcagtaacatgcgcatctactggctgagacagcgccaggcaccgagcagtgacagtcaccacgagttcctggccctctgggattccgcaaaagggactatccacggtgaagaggtggaacaggagaagatagctgtgtttcgggatgcaagccggttcattctcaatctcacaagcgtgaagccggaagacagtggcatctacttctgcatgatcgtcgggagccccgagctgaccttcgggaagggaactcagctgagtgtggttgatttccttcccaccactgcccagcccaccaagaagtccaccctcaagaagagagtgtgccggttacccaggccagagacccagaagggcccactttgtagccccatcacccttggcctgctggtggctggcgtcctggttctgctggtttccctgggagtggccatccacctgtgctgccggcggaggagagcccggcttcgtttcatgaaacagcctcaaggggaaggtatatcaggaacctttgtcccccaatgcctgcatggatactacagcaatactacaacctcacagaagctgcttaacccatggatcctgaaaacataggcaagaagcacaggtcctgatgagtggatctttactacttttaccagattcctccctcgctcagagggatcctcccacacacccagcagagacttctctgccaccatcaaccccccaagtcatagggggctcaagttctgccctggtgagctgtggcccccatccttgtgaaccccaaagtgtcccccttgtggaaccaaatgtatccatcttgaataaatttgcccaaaatcctaaagaccgggaaaagggaaccattgagcttggcaaaaaaaaaaaaaaa

SEQ ID NO: 66 - protein, 243 aa, Homo sapiens
MRPRLWLLLAAQLTVLHGNSVLQQTPAYIKVQTNKMVMLSCEAKISLSNMRIYWLRQRQAPSSDSHHEFLALWDSAKGTIHGEEVEQEKIAVFRDASRFILNLTSVKPEDSGIYFCMIVGSPELTFGKGTQLSVVDFLPTTAQPTKKSTLKKRVCRLPRPETQKGPLCSPITLGLLVAGVLVLLVSLGVAIHLCCRRRRARLRFMKQPQGEGISGTFVPQCLHGYYSNTTTSQKLLNPWILKT

SEQ ID NO: 67 - DNA, 1119 bp, Homo sapiens
  CDS (51)..(716)
gcgactgtctccgccgagcccccggggccaggtgtcccgggcgcgccacgatgcggccgcggctgtggctcctcttggccgcgcagctgacagttctccatggcaactcagtcctccagcagacccctgcatacataaaggtgcaaaccaacaagatggtgatgctgtcctgcgaggctaaaatctccctcagtaacatgcgcatctactggctgagacagcgccaggcaccgagcagtgacagtcaccacgagttcctggccctctgggattccgcaaaagggactatccacggtgaagaggtggaacaggagaagatagctgtgtttcgggatgcaagccggttcattctcaatctcacaagcgtgaagccggaagacagtggcatctacttctgcatgatcgtcgggagccccgagctgaccttcgggaagggaactcagctgagtgtggttgatttccttcccaccactgcccagcccaccaagaagtccaccctcaagaagagagtgtgccggttacccaggccagagacccagaagggcccactttgtagccccatcacccttggcctgctggtggctggcgtcctggttctgctggtttccctgggagtggccatccacctgtgctgccggcggaggagagcccggcttcgtttcatgaaacaactaagattacatccactggagaaatgttccagaatggactactgaatatacaggcctcaaggggaaggtatatcaggaacctttgtcccccaatgcctgcatggatactacagcaatactacaacctcacagaagctgcttaacccatggatcctgaaaacataggcaagaagcacaggtcctgatgagtggatctttactacttttaccagattcctccctcgctcagagggatcctcccacacacccagcagagacttctctgccaccatcaaccccccaagtcatagggggctcaagttctgccctggtgagctgtggcccccatccttgtgaaccccaaagtgtcccccttgtggaaccaaatgtatccatcttgaataaatttgcccaaaatcctaaagaccgggaaaagggaaccattgagcttggcaaaaaaaaaaaaaaa

SEQ ID NO: 68 - protein, 221 aa, Homo sapiens
MRPRLWLLLAAQLTVLHGNSVLQQTPAYIKVQTNKMVMLSCEAKISLSNMRIYWLRQRQAPSSDSHHEFLALWDSAKGTIHGEEVEQEKIAVFRDASRFILNLTSVKPEDSGIYFCMIVGSPELTFGKGTQLSVVDFLPTTAQPTKKSTLKKRVCRLPRPETQKGPLCSPITLGLLVAGVLVLLVSLGVAIHLCCRRRRARLRFMKQLRLHPLEKCSRMDY

SEQ ID NO: 69 - DNA, 975 bp, Homo sapiens
  CDS (51)..(692)
gcgactgtctccgccgagcccccggggccaggtgtcccgggcgcgccacgatgcggccgcggctgtggctcctcttggccgcgcagctgacagttctccatggcaactcagtcctccagcagacccctgcatacataaaggtgcaaaccaacaagatggtgatgctgtcctgcgaggctaaaatctccctcagtaacatgcgcatctactggctgagacagcgccaggcaccgagcagtgacagtcaccacgagttcctggccctctgggattccgcaaaagggactatccacggtgaagaggtggaacaggagaagatagctgtgtttcgggatgcaagccggttcattctcaatctcacaagcgtgaagccggaagacagtggcatctacttctgcatgatcgtcgggagccccgagctgaccttcgggaagggaactcagctgagtgtggttgatttccttcccaccactgcccagcccaccaagaagtccaccctcaagaagagagtgtgccggttacccaggccagagacccagaagggccggcggaggagagcccggcttcgtttcatgaaacagcctcaaggggaaggtatatcaggaacctttgtcccccaatgcctgcatggatactacagcaatactacaacctcacagaagctgcttaacccatggatcctgaaaacataggcaagaagcacaggtcctgatgagtggatctttactacttttaccagattcctccctcgctcagagggatcctcccacacacccagcagagacttctctgccaccatcaaccccccaagtcatagggggctcaagttctgccctggtgagctgtggcccccatccttgtgaaccccaaagtgtcccccttgtggaaccaaatgtatccatcttgaataaatttgcccaaaatcctaaagaccgggaaaagggaaccattgagcttggcaaaaaaaaaaaaaaa

SEQ ID NO: 70 - protein, 213 aa, Homo sapiens
MRPRLWLLLAAQLTVLHGNSVLQQTPAYIKVQTNKMVMLSCEAKISLSNMRIYWLRQRQAPSSDSHHEFLALWDSAKGTIHGEEVEQEKIAVFRDASRFILNLTSVKPEDSGIYFCMIVGSPELTFGKGTQLSVVDFLPTTAQPTKKSTLKKRVCRLPRPETQKGRRRRARLRFMKQPQGEGISGTFVPQCLHGYYSNTTTSQKLLNPWILKT

SEQ ID NO: 71 - DNA, 1424 bp, Homo sapiens
  CDS (51)..(683)
gcgactgtctccgccgagcccccggggccaggtgtcccgggcgcgccacgatgcggccgcggctgtggctcctcttggccgcgcagctgacagttctccatggcaactcagtcctccagcagacccctgcatacataaaggtgcaaaccaacaagatggtgatgctgtcctgcgaggctaaaatctccctcagtaacatgcgcatctactggctgagacagcgccaggcaccgagcagtgacagtcaccacgagttcctggccctctgggattccgcaaaagggactatccacggtgaagaggtggaacaggagaagatagctgtgtttcgggatgcaagccggttcattctcaatctcacaagcgtgaagccggaagacagtggcatctacttctgcatgatcgtcgggagccccgagctgaccttcgggaagggaactcagctgagtgtggttgatttccttcccaccactgcccagcccaccaagaagtccaccctcaagaagagagtgtgccggttacccaggccagagacccagaagggcccactttgtagccccatcacccttggcctgctggtggctggcgtcctggttctgctggtttccctgggagtggccatccacctgtgctgccggcggaggagagcccggcttcgtttcatgaaacaattttacaaatgagcagagaatacggttttggtgtcctgctacaaaaagacatcggtcagtaacgagcacgatgtggaaaaatgagagaagggacacattcaaccctggagagttcaatggctgctgaagctgcctgcttttcactgctgcaaggcctttctgtgtgtgatgtgcatgggagcaacttgttcgtgggtcatcgggaatactagggagaaggtttcattgcccccagggcacttcacagagtgtgctggaggactgagtaagaaatgctgcccatgccaccgcttccggctcctgtgctttccctgaactgggacctttagtggtggccatttagccaccatctttgcaggttgctttgccctggtagggcagtaacattgggtcctgggtctttcatggggtgatgctgggctggctccctcttggtcttcccaggctggggctgaccttcctcgcagagaggccaggtgcaggttgggaatgaggcttgctgagaggggctgtccagttcccagaaggcatatcagtctctgagggcttcctttggggccgggaacttgcgggtttgaggataggagttcacttcatcttctcagctcccatttctactcttaagtttctcagctcccatttctactctcccatggcttaatgcttctttcattttctgtttgttttatacaaatgtcttagttgtacaaataaagtcccaggttaaagataacaaacggctcctgtgacata

SEQ ID NO: 72 - protein, 210 aa, Homo sapiens
MRPRLWLLLAAQLTVLHGNSVLQQTPAYIKVQTNKMVMLSCEAKISLSNMRIYWLRQRQAPSSDSHHEFLALWDSAKGTIHGEEVEQEKIAVFRDASRFILNLTSVKPEDSGIYFCMIVGSPELTFGKGTQLSVVDFLPTTAQPTKKSTLKKRVCRLPRPETQKGPLCSPITLGLLVAGVLVLLVSLGVAIHLCCRRRRARLRFMKQFYK

SEQ ID NO: 73 - DNA, 3145 bp, Homo sapiens
  CDS (162)..(1325)
aaagtctatacgcaataagtaagcccaaagaggcatgtttgcttggcgatgcccagcagataagccaggcaaacctcggtgtgatcgaagaagccaatttgagactcagcctagtccaggcaagctactggcacctgctgctctcaactaacctccacacaatggtgttcgcattttggaaggtctttctgatcctaagctgccttgcaggtcaggttagtgtggtgcaagtgaccatcccagacggtttcgtgaacgtgactgttggatctaatgtcactctcatctgcatctacaccaccactgtggcctcccgagaacagctttccatccagtggtctttcttccataagaaggagatggagccaatttctatttacttttctcaaggtggacaagctgtagccatcgggcaatttaaagatcgaattacagggtccaacgatccaggtaatgcatctatcactatctcgcatatgcagccagcagacagtggaatttacatctgcgatgttaacaaccccccagactttctcggccaaaaccaaggcatcctcaacgtcagtgtgttagtgaaaccttctaagcccctttgtagcgttcaaggaagaccagaaactggccacactatttccctttcctgtctctctgcgcttggaacaccttcccctgtgtactactggcataaacttgagggaagagacatcgtgccagtgaaagaaaacttcaacccaaccaccgggattttggtcattggaaatctgacaaattttgaacaaggttattaccagtgtactgccatcaacagacttggcaatagttcctgcgaaatcgatctcacttcttcacatccagaagttggaatcattgttggggccttgattggtagcctggtaggtgccgccatcatcatctctgttgtgtgcttcgcaaggaataaggcaaaagcaaaggcaaaagaaagaaattctaagaccatcgcggaacttgagccaatgacaaagataaacccaaggggagaaagcgaagcaatgccaagagaagacgctacccaactagaagtaactctaccatcttccattcatgagactggccctgataccatccaagaaccagactatgagccaaagcctactcaggagcctgccccagagcctgccccaggatcagagcctatggcagtgcctgaccttgacatcgagctggagctggagccagaaacgcagtcggaattggagccagagccagagccagagccagagtcagagcctggggttgtagttgagcccttaagtgaagatgaaaagggagtggttaaggcataggctggtggcctaagtacagcattaatcattaaggaacccattactgccatttggaattcaaataacctaaccaacctccacctcctccttccattttgaccaaccttcttctaacaaggtgctcattcctactatgaatccagaataaacacgccaagatagcagctaaatcagcaagggttcctgtattaccaatatagaatactaacaattttactaacacgtaagcataacaaatgacagggcaagtgatttctaacttagttgagttttgcaacagtacctgtgttgttatttcagaaaatattatttctctctttttaactactctttttttttattttggacagagtcttgctccgtcgcgcaggctgtgatcgtagtggtgcgatctcggctcactgcggcctccgctccctgggttcaagcgattctcctgcctgagcctcctgagtagctgggactgcaggcacgtgccaccacgcccggctagttttttgtatttttagtagagatggggtttcacgttgttggccaggatggtctccatctcctgacctcatgatccgcccaccttggcctcccaaaatgctgggattacaggcatgagccactgcgcccggcctctttttagctactcttatgttccacatgcacatatgacaaggtggcattaattagattcaatattatttctaggaatagttcctcattcatttttatattgaccactaagaaaataattcatcagcattatctcatagattggaaaattttctccaaatacaatagaggagaatatgtaaagggtatacattaattggtacgtagcatttaaaatcaggtcttataattaatgcttcattcctcatattagatttcccaagaaatcaccctggtatccaatatctgagcatggcaaatttaaaaaataacacaatttcttgcctgtaaccctagcactttgggaggccgaggcaggtggatcacctgaggtcaggagttcgagaccagcctggccggcatggcgaaaccccttctctgctgaaaatacagaaattagctgggcgtggtggtgcatgcctgtagtcccagctacttgggaggctgaggcgggagaatcgcttgaacccagggggtggaggttgcagtgagccgagattgtgccactgcactccaacctgggtgacagagtgagattccatctgaaaaacaaaaacaaaaacagaaaacaaacaaacaaaaaacaaaaaatccccacaactttgtcaaataatgtacaggcaaacactttcaaatataatttccttcagtgaatacaaaatgttgatatcataggtgatgtacaatttagttttgaatgagttattatgttatcactgtgtctgatgttatctactttgaaaggcagtccagaaaagtgttctaagtgaactcttaagatctattttagataatttcaactaattaaataacctgttttactgcctgtacattccacattaataaagcgataccaatcttatatgaatgctaatattactaaaatgcactgatatcacttcttcttcccctgttgaaaagctttctcatgatcatatttcacccacatctcaccttgaagaaacttacaggtagacttaccttttcacttgtggaattaatcatatttaaatcttactttaaggctcaataaataatactcataatgtctcattttagtgactcctaaggctagtccttttataaacaactttttctgacatagcatttatgtataataaaccagacatttaaagtgtaaaaaaaaaaaaaaaaaa

SEQ ID NO: 74 - protein, 387 aa, Homo sapiens
MVFAFWKVFLILSCLAGQVSVVQVTIPDGFVNVTVGSNVTLICIYTTTVASREQLSIQWSFFHKKEMEPISIYFSQGGQAVAIGQFKDRITGSNDPGNASITISHMQPADSGIYICDVNNPPDFLGQNQGILNVSVLVKPSKPLCSVQGRPETGHTISLSCLSALGTPSPVYYWHKLEGRDIVPVKENFNPTTGILVIGNLTNFEQGYYQCTAINRLGNSSCEIDLTSSHPEVGIIVGALIGSLVGAAIIISVVCFARNKAKAKAKERNSKTIAELEPMTKINPRGESEAMPREDATQLEVTLPSSIHETGPDTIQEPDYEPKPTQEPAPEPAPGSEPMAVPDLDIELELEPETQSELEPEPEPEPESEPGVVVEPLSEDEKGVVKA

SEQ ID NO: 75 - DNA, 2030 bp, Homo sapiens
  CDS (170)..(751)
aatctaggtggggccgcccggagcggcgtcctcgggagccgcctccccgcggcctcttcgcttttgtggcggcgcccgcgctcgcaggccactctctgctgtcgcccgtcccgcgcgctcctccgacccgctccgctccgctccgctcggccccgcgccgcccgtcaacatgatccgctgcggcctggcctgcgagcgctgccgctggatcctgcccctgctcctactcagcgccatcgccttcgacatcatcgcgctggccggccgcggctggttgcagtctagcgaccacggccagacgtcctcgctgtggtggaaatgctcccaagagggcggcggcagcgggtcctacgaggagggctgtcagagcctcatggagtacgcgtggggtagagcagcggctgccatgctcttctgtggcttcatcatcctggtgatctgtttcatcctctccttcttcgccctctgtggaccccagatgcttgtcttcctgagagtgattggaggtctccttgccttggctgctgtgttccagatcatctccctggtaatttaccccgtgaagtacacccagaccttcacccttcatgccaaccctgctgtcacttacatctataactgggcctacggctttgggtgggcagccacgattatcctgattggctgtgccttcttcttctgctgcctccccaactacgaagatgaccttctgggcaatgccaagcccaggtacttctacacatctgcctaacttgggaatgaatgtgggagaaaatcgctgctgctgagatggactccagaagaagaaactgtttctccaggcgactttgaacccattttttggcagtgttcatattattaaactagtcaaaaatgctaaaataatttgggagaaaatattttttaagtagtgttatagtttcatgtttatcttttattatgttttgtgaagttgtgtcttttcactaattacctatactatgccaatatttccttatatctatccataacatttatactacatttgtaagagaatatgcacgtgaaacttaacactttataaggtaaaaatgaggtttccaagatttaataatctgatcaagttcttgttatttccaaatagaatggactcggtctgttaagggctaaggagaagaggaagataaggttaaaagttgttaatgaccaaacattctaaaagaaatgcaaaaaaaaagtttattttcaagccttcgaactatttaaggaaagcaaaatcatttcctaaatgcatatcatttgtgagaatttctcattaatatcctgaatcattcattttagctaaggcttcatgttgactcgatatgtcatctaggaaagtactatttcatggtccttttttttttttttttttacaagtttagaatacctggtttattgggaaaacttcataatgaaaactacaattagctttttccacaacttacaaaataataatctgatatttaaaatgaattggttttcattatgtaagtcgaaatggtaaaaaatcataatgacctatccgatgcatcatatatatgctattcagagaaactcaaatccccgaattctcctgtggcatgttttatatcagacatttaaaatctgtttaccaagaaagaccaggattttaactatatgtaggtttctgcttacagttgcaaactatcagaagcctgtctatatgatagagcccagataaacctgagatttagaaaagcaagtcatttattctcctgaggctgttttagtggcacttttgtgacaagaatgaccctcctaatgctttactacacaacttaaccagatctatcagtcatgataaattagacccagtccatctttcaatccagtctactctggttctgaacatataaacacaaaacactacagatttattaatatagcattttcccacaccctaaccctataaagaactttaaaagagaaaatttcatctaaatatttcacacttaaaggaaagccttaccaactatggcaacaggttt

SEQ ID NO: 76 - protein, 193 aa, Homo sapiens
MIRCGLACERCRWILPLLLLSAIAFDIIALAGRGWLQSSDHGQTSSLWWKCSQEGGGSGSYEEGCQSLMEYAWGRAAAAMLFCGFIILVICFILSFFALCGPQMLVFLRVIGGLLALAAVFQIISLVIYPVKYTQTFTLHANPAVTYIYNWAYGFGWAATIILIGCAFFFCCLPNYEDDLLGNAKPRYFYTSA

SEQ ID NO: 77 - DNA, 1300 bp, Homo sapiens
  CDS (84)..(773)
ctgcagccggtgcagttacacgttttcctccaaggagcctcggacgttgtcacgggtttggggtcggggacagagcggtgaccatggccaggctggcgttgtctcctgtgcccagccactggatggtggcgttgctgctgctgctctcagctgagccagtaccagcagccagatcggaggaccggtaccggaatcccaaaggtagtgcttgttcgcggatctggcagagcccacgtttcatagccaggaaacggggcttcacggtgaaaatgcactgctacatgaacagcgcctccggcaatgtgagctggctctggaagcaggagatggacgagaatccccagcagctgaagctggaaaagggccgcatggaagagtcccagaacgaatctctcgccaccctcaccatccaaggcatccggtttgaggacaatggcatctacttctgtcagcagaagtgcaacaacacctcggaggtctaccagggctgcggcacagagctgcgagtcatgggattcagcaccttggcacagctgaagcagaggaacacgctgaaggatggtatcatcatgatccagacgctgctgatcatcctcttcatcatcgtgcctatcttcctgctgctggacaaggatgacagcaaggctggcatggaggaagatcacacctacgagggcctggacattgaccagacagccacctatgaggacatagtgacgctgcggacaggggaagtgaagtggtctgtaggtgagcacccaggccaggagtgagagccaggtcgccccatgacctgggtgcaggctccctggcctcagtgactgcttcggagctgcctggctcatggcccaacccctttcctggaccccccagctggcctctgaagctggcccaccagagctgccatttgtctccagcccctggtccccagctcttgccaaagggcctggagtagaaggacaacagggcagcaacttggagggagttctctggggatggacgggacccagccttctgggggtgctatgaggtgatccgtccccacacatgggatgggggaggcagagactggtccagagcccgcaaatggactcggagccgagggcctcccagcagagcttgggaagggccatggacccaactgggccccagaagagccacaggaacatcattcctctcccgcaaccactcccaccccagggaggccctggcctccagtgccttcccccgtggaataaacggtgtgtcctgagaaaccacaaaaaaaaaaaaaaaaaaaaaaaaaaaaaaaaaaaaaaaa

SEQ ID NO: 78 - protein, 229 aa, Homo sapiens
MARLALSPVPSHWMVALLLLLSAEPVPAARSEDRYRNPKGSACSRIWQSPRFIARKRGFTVKMHCYMNSASGNVSWLWKQEMDENPQQLKLEKGRMEESQNESLATLTIQGIRFEDNGIYFCQQKCNNTSEVYQGCGTELRVMGFSTLAQLKQRNTLKDGIIMIQTLLIILFIIVPIFLLLDKDDSKAGMEEDHTYEGLDIDQTATYEDIVTLRTGEVKWSVGEHPGQE

SEQ ID NO: 79 - DNA, 988 bp, Homo sapiens
  CDS (84)..(461)
ctgcagccggtgcagttacacgttttcctccaaggagcctcggacgttgtcacgggtttggggtcggggacagagcggtgaccatggccaggctggcgttgtctcctgtgcccagccactggatggtggcgttgctgctgctgctctcagctgagccagtaccagcagccagatcggaggaccggtaccggaatcccaaaggattcagcaccttggcacagctgaagcagaggaacacgctgaaggatggtatcatcatgatccagacgctgctgatcatcctcttcatcatcgtgcctatcttcctgctgctggacaaggatgacagcaaggctggcatggaggaagatcacacctacgagggcctggacattgaccagacagccacctatgaggacatagtgacgctgcggacaggggaagtgaagtggtctgtaggtgagcacccaggccaggagtgagagccaggtcgccccatgacctgggtgcaggctccctggcctcagtgactgcttcggagctgcctggctcatggcccaacccctttcctggaccccccagctggcctctgaagctggcccaccagagctgccatttgtctccagcccctggtccccagctcttgccaaagggcctggagtagaaggacaacagggcagcaacttggagggagttctctggggatggacgggacccagccttctgggggtgctatgaggtgatccgtccccacacatgggatgggggaggcagagactggtccagagcccgcaaatggactcggagccgagggcctcccagcagagcttgggaagggccatggacccaactgggccccagaagagccacaggaacatcattcctctcccgcaaccactcccaccccagggaggccctggcctccagtgccttcccccgtggaataaacggtgtgtcctgagaaaccacaaaaaaaaaaaaaaaaaaaaaaaaaaaaaaaaaaaaaaaa

SEQ ID NO: 80 - protein, 125 aa, Homo sapiens
MARLALSPVPSHWMVALLLLLSAEPVPAARSEDRYRNPKGFSTLAQLKQRNTLKDGIIMIQTLLIILFIIVPIFLLLDKDDSKAGMEEDHTYEGLDIDQTATYEDIVTLRTGEVKWSVGEHPGQE

SEQ ID NO: 81 - DNA, 1303 bp, Homo sapiens
  CDS (84)..(776)
ctgcagccggtgcagttacacgttttcctccaaggagcctcggacgttgtcacgggtttggggtcggggacagagcggtgaccatggccaggctggcgttgtctcctgtgcccagccactggatggtggcgttgctgctgctgctctcagcagctgagccagtaccagcagccagatcggaggaccggtaccggaatcccaaaggtagtgcttgttcgcggatctggcagagcccacgtttcatagccaggaaacggggcttcacggtgaaaatgcactgctacatgaacagcgcctccggcaatgtgagctggctctggaagcaggagatggacgagaatccccagcagctgaagctggaaaagggccgcatggaagagtcccagaacgaatctctcgccaccctcaccatccaaggcatccggtttgaggacaatggcatctacttctgtcagcagaagtgcaacaacacctcggaggtctaccagggctgcggcacagagctgcgagtcatgggattcagcaccttggcacagctgaagcagaggaacacgctgaaggatggtatcatcatgatccagacgctgctgatcatcctcttcatcatcgtgcctatcttcctgctgctggacaaggatgacagcaaggctggcatggaggaagatcacacctacgagggcctggacattgaccagacagccacctatgaggacatagtgacgctgcggacaggggaagtgaagtggtctgtaggtgagcacccaggccaggagtgagagccaggtcgccccatgacctgggtgcaggctccctggcctcagtgactgcttcggagctgcctggctcatggcccaacccctttcctggaccccccagctggcctctgaagctggcccaccagagctgccatttgtctccagcccctggtccccagctcttgccaaagggcctggagtagaaggacaacagggcagcaacttggagggagttctctggggatggacgggacccagccttctgggggtgctatgaggtgatccgtccccacacatgggatgggggaggcagagactggtccagagcccgcaaatggactcggagccgagggcctcccagcagagcttgggaagggccatggacccaactgggccccagaagagccacaggaacatcattcctctcccgcaaccactcccaccccagggaggccctggcctccagtgccttcccccgtggaataaacggtgtgtcctgagaaaccacaaaaaaaaaaaaaaaaaaaaaaaaaaaaaaaaaaaaaaaa

SEQ ID NO: 82 - protein, 230 aa, Homo sapiens
MARLALSPVPSHWMVALLLLLSAAEPVPAARSEDRYRNPKGSACSRIWQSPRFIARKRGFTVKMHCYMNSASGNVSWLWKQEMDENPQQLKLEKGRMEESQNESLATLTIQGIRFEDNGIYFCQQKCNNTSEVYQGCGTELRVMGFSTLAQLKQRNTLKDGIIMIQTLLIILFIIVPIFLLLDKDDSKAGMEEDHTYEGLDIDQTATYEDIVTLRTGEVKWSVGEHPGQE

SEQ ID NO: 83 - DNA, 5199 bp, Homo sapiens
  CDS (1)..(5199)
atgttcttcaaaggaggaagctggctttggttatacatcagaacaagtattattctaggaagtgagctaaacagcccagcaccacatgggcaaaataattgttaccagcttaacagatttcaatgcagctttgaggaagcacagcattactgtcatgtgcagagaggattcctagctcatatttggaacaaggaagttcaagatctcatccgggactatctggaagaaggaaagaagtggtggattgggcaaaatgtaatgccattgaaaaagcatcaagacaacaaatacccagcagacgttgcagccaacgggcccccaaagcccctcagctgcacctacctgtccagaaacttcattcggatctcatccaaaggggacaagtgcttactgaaatactatttcatttgccagactggtgactttttggacggagatgcccattatgaaagaaatggaaataattcccatttgtaccagagacacaagaagacaaaaagaggagttgcaatagcaagagacaaaatgcccccaggacctggtcatcttccaaccacatgtcactatcctcttcctgctcatctttccaagaccctgtgtcatcccatcagccagtttccttcagtactatcaagtatcacatcacaggtaacatcagccgcatctgaacccagcagccagcctctccctgtgataacacagctcaccatgcccgtgtctgtcacgcatgctgggcaatctctggcagaaacaacttcaagcccaaaggaagaaggtcatccgaataccttcacctcttatctacaagtgtcattgcagaaggcatctggtcaggtcatagatgagatagcagggaacttcagcagagcagttcatggtttgcaagctcttaacaaactacaggaagcttgtgagttcctccagaaactaacagccttaaccccaagattttctaagccagctcaggttaatctcatcaattcccttatttacctgagtgaggagttactcaggatcccatttcagaacaacaacagtctgggcttcaaagttcctccaactgtctgcccctttcattccctcaacaatgtcaccaaagctggagaaggaagttggctggaatccaagcgtcatactgagccggtagaagacatcctggaaatgtccttggtggagtttgggaatatcggggaagcatttctagagcagaaccagtctcccgagtcttcagtgactttgacctctgccaatgctactctgctgctgagcagacaaaacatatcaactttaccgctgagctcttacactctgggtcacccagcccctgtgaggctaggctttccgtcggctttagctttgaaggagctcttgaataaacatccaggagttaatgtccaaataacaggactagctttcaatcccttcaaggatttggacaacagaaacattgttggaagcattggaagtgtgttactaagcgctaatcgtaaattgctccaagtccatgatttaatggaggacattgagatcatgctctggagaaatgttagcttggaaacccatcccaccagcctcaacatgagcacacatcagcttacaatcacagtgaacgtcacttccttggagaaatccttgatagtgagcatagatcctgacagtccccttttaatgacactctacctggggttccagtatcagcctaactgcactcacttccacctgaacatcacccttccaaaggataaggtgtggcaaaaagatgaggagtacacgtgggtgctgaatccagagcatctgcagcacgggattggcacctactatataacagctgtgctgagtgagaggcaggagggtgctcagcagacacccagcttggtctcggtcatcaccgccgtcactcagtgttactactgggagatccacaaccagacatggagcagcgccggatgccaagttgggccacagagcacaattctgaggacacagtgtctctgtaaccacctgaccttctttgccagcgacttctttgtcgtgcccaggaccgtgaatgttgaagacacgatcaaactgttccttcgcgtgaccaacaatcctgttggggtgtcactgctggccagccttttaggattttatgtgatcacagttgtgtgggctcggaaaaaggatcaagcagatatgcagaaggtgaaggtcactgtcctggctgataatgaccccagcgctcaatttcactaccttattcaggtctacaccggatatcgaagaagcgctgctacaacagctaaggttgtcatcaccctctatggatcagagggacggagtgagccccatcacctctgtgacccccagaagacagtctttgaacgagggggcctggatgtcttccttctcaccacttggacctctctagggaacctgcacagccttcggctctggcatgacaattctggcgtcagtccctcctggtatgtcagccaggtaattgtctgtgacatggcagttaagaggaagtggcatttcctgtgcaattgctggctggctgtggacctcggagactgtgagcttgaccgggtcttcatcccagtttcaaagagagagctcttttcctttagacatctgttttcctccatgattgtggaaaagttcacccaggattatctgtggctttcaattgcaactcggcatccctggaaccagtttacaagggtccaacggctgtcttgctgcatgacactgctactctgcaacatggtcatcaatgttatgttctggaagataaacagcaccactgccaagagagatgagcaaatgcgtccatttgctgtggcctggtctgaactgctggtcagcatccatactgctgtcatcctcttcccaatcaatcttgtcatagggcggctcttcccgttgattgagccacaggagactctgcccctctttcctcccatccaggcctcctgcctctcagatgcttctgttgagcctctctctgccacaatggtagttgaggaattaaaggaaactgtgagattcctgctcaggagaaatacatacctactctccaagtgtgagcagccgccatggagttcttgggacattactaagctggtgaaacttttatccagcctcgtatcatctcacttggagggtcaaggctgtcatcagcagggagagcgccactgggcacgtgttgttcctgaaaaccaccatcatttctgctgttacctgcatagagttctgcagaggctgaaatctcacttaggcacgctgggtctcacccagggtcaccagtcctgtgacttcctagatgcagccagccaacttcaaaaactccaggaactcttggaaacacatattcttcccacggagcaagagccatccagggaagtcaccagttttgccatcctgagctcagaagaaggaaaaaagcccatctcaaatggcctgtccaaatggttgacttcagtctgctggctcctcttaggtttcactagcctggcttcagccttttttacagcactttatagcttggaattgagcaaagaccaagccaccagctggatgatttcaattattttatcagtgcttcagaacatcttcatcagccagccagtaaaggtggtcttcttcacattcttatactcactgatgatgagcaggatgccacggcttaacaaagagaatgaacaacaaacaaagaggatcttggcactcttggcaaaatgttcttcgtcagtaccaggttcaagagataagaacaaccccgtctatgtagccccagctataaatagtccaactaagcacccagaaagaaccttgaaaaagaagaaactcttcaagctgactggagatattttggtacaaatcctcttccttaccctgttgatgactgcaatctactctgcaaagaactccaatagattttacctccaccaagctatctggaagacattttcgcaccagttctcggaaatcaaacttcttcaggatttctacccctgggccaatcatatccttcttcctagcctgtatggggattacagaggtaagaatgcagtcctggagcccagtcattgcaaatgtggggtacaattaattttccaaataccccgtaccaagacctatgagaaagtggacgaaggtcagctggcgttttgtgataacggccatacctgtgggcgtcccaagagcctattccctggacttcatctaaggaggttcagttacatctgttcacccaggcccatggtgctgattcccactgatgagcttcacgaaaggctgacaagcaagaatgagaatggattcagttacatcatgagaggtgctttcttcacctctttgagactggaaagcttcacttcccttcagatgtcaaagaagggctgtgtctggtctatcatctcacaagtcatctattatctactggtctgttactatgccttcatacagggttgtcagctgaaacagcagaagtggaggttcttcactgggaaaagaaacattctggacacaagtataatcctcattagcttcatcctcctggggcttgacatgaagagtatttctctacataagaaaaacatggcacgataccgcgatgaccaggacagattcatcagcttctatgaggcagtaaaagtgaactctgctgcgactcaccttgtgggcttcccggttctcctggcaactgttcagttatggaacctgctgcgtcatagccccaggctgcgggtcatcagcaggacactgagccgagcctgggacgaggtggtgggctttctgctgatcatcctaatcctgctgacaggctatgccattgcctttaacctgctgtttggatgcagcatctctgactaccggacatttttcagctcagcagtgactgttgttggtctcctgatgggaatttctcaccaagaggaggttttcgctttagacccagtcctgggcacctttctgatcctcaccagtgtcatcttgatggtacttgtggtaattaatcttttcgtttcggccattctcatggcctttggaaaagaaagaaagtcgcttaagaaagaagctgcactaatagatacactgctacagaagctctcaaatttgttaggaatcagttggccccaaaaaacctcatctgagcaagcagccacgacagcagtgggcagtgacactgaagttttagatgaactaccttaa

SEQ ID NO: 84 - protein, 1732 aa, Homo sapiens
MFFKGGSWLWLYIRTSIILGSELNSPAPHGQNNCYQLNRFQCSFEEAQHYCHVQRGFLAHIWNKEVQDLIRDYLEEGKKWWIGQNVMPLKKHQDNKYPADVAANGPPKPLSCTYLSRNFIRISSKGDKCLLKYYFICQTGDFLDGDAHYERNGNNSHLYQRHKKTKRGVAIARDKMPPGPGHLPTTCHYPLPAHLSKTLCHPISQFPSVLSSITSQVTSAASEPSSQPLPVITQLTMPVSVTHAGQSLAETTSSPKEEGHPNTFTSYLQVSLQKASGQVIDEIAGNFSRAVHGLQALNKLQEACEFLQKLTALTPRFSKPAQVNLINSLIYLSEELLRIPFQNNNSLGFKVPPTVCPFHSLNNVTKAGEGSWLESKRHTEPVEDILEMSLVEFGNIGEAFLEQNQSPESSVTLTSANATLLLSRQNISTLPLSSYTLGHPAPVRLGFPSALALKELLNKHPGVNVQITGLAFNPFKDLDNRNIVGSIGSVLLSANRKLLQVHDLMEDIEIMLWRNVSLETHPTSLNMSTHQLTITVNVTSLEKSLIVSIDPDSPLLMTLYLGFQYQPNCTHFHLNITLPKDKVWQKDEEYTWVLNPEHLQHGIGTYYITAVLSERQEGAQQTPSLVSVITAVTQCYYWEIHNQTWSSAGCQVGPQSTILRTQCLCNHLTFFASDFFVVPRTVNVEDTIKLFLRVTNNPVGVSLLASLLGFYVITVVWARKKDQADMQKVKVTVLADNDPSAQFHYLIQVYTGYRRSAATTAKVVITLYGSEGRSEPHHLCDPQKTVFERGGLDVFLLTTWTSLGNLHSLRLWHDNSGVSPSWYVSQVIVCDMAVKRKWHFLCNCWLAVDLGDCELDRVFIPVSKRELFSFRHLFSSMIVEKFTQDYLWLSIATRHPWNQFTRVQRLSCCMTLLLCNMVINVMFWKINSTTAKRDEQMRPFAVAWSELLVSIHTAVILFPINLVIGRLFPLIEPQETLPLFPPIQASCLSDASVEPLSATMVVEELKETVRFLLRRNTYLLSKCEQPPWSSWDITKLVKLLSSLVSSHLEGQGCHQQGERHWARVVPENHHHFCCYLHRVLQRLKSHLGTLGLTQGHQSCDFLDAASQLQKLQELLETHILPTEQEPSREVTSFAILSSEEGKKPISNGLSKWLTSVCWLLLGFTSLASAFFTALYSLELSKDQATSWMISIILSVLQNIFISQPVKVVFFTFLYSLMMSRMPRLNKENEQQTKRILALLAKCSSSVPGSRDKNNPVYVAPAINSPTKHPERTLKKKKLFKLTGDILVQILFLTLLMTAIYSAKNSNRFYLHQAIWKTFSHQFSEIKLLQDFYPWANHILLPSLYGDYRGKNAVLEPSHCKCGVQLIFQIPRTKTYEKVDEGQLAFCDNGHTCGRPKSLFPGLHLRRFSYICSPRPMVLIPTDELHERLTSKNENGFSYIMRGAFFTSLRLESFTSLQMSKKGCVWSIISQVIYYLLVCYYAFIQGCQLKQQKWRFFTGKRNILDTSIILISFILLGLDMKSISLHKKNMARYRDDQDRFISFYEAVKVNSAATHLVGFPVLLATVQLWNLLRHSPRLRVISRTLSRAWDEVVGFLLIILILLTGYAIAFNLLFGCSISDYRTFFSSAVTVVGLLMGISHQEEVFALDPVLGTFLILTSVILMVLVVINLFVSAILMAFGKERKSLKKEAALIDTLLQKLSNLLGISWPQKTSSEQAATTAVGSDTEVLDELP

SEQ ID NO: 85 - DNA, 2139 bp, Homo sapiens
  CDS (35)..(769)
acatctgcttcctgtaggccctctgggcagaagcatgcgctggtgtctcctcctgatctgggcccaggggctgaggcaggctcccctcgcctcaggaatgatgacaggcacaatagaaacaacggggaacatttctgcagagaaaggtggctctatcatcttacaatgtcacctctcctccaccacggcacaagtgacccaggtcaactgggagcagcaggaccagcttctggccatttgtaatgctgacttggggtggcacatctccccatccttcaaggatcgagtggccccaggtcccggcctgggccttaccctccagtcgctgaccgtgaacgatacaggggagtacttctgcatctatcacacctaccctgatggggcgtacactgggagaatcttcctggaggtcctagaaagctcagtggctgagcacggtgccaggttccagattccattgcttggagccatggccgcgacgctggtggtcatctgcacagcagtcatcgtggtggtcgcgttgactagaaagaagaaagccctcagaatccattctgtggaaggtgacctcaggagaaaatcagctggacaggaggaatggagccccagtgctccctcacccccaggaagctgtgtccaggcagaagctgcacctgctgggctctgtggagagcagcggggagaggactgtgccgagctgcatgactacttcaatgtcctgagttacagaagcctgggtaactgcagcttcttcacagagactggttagcaaccagaggcatcttctggaagatacacttttgtctttgctattatagatgaatatataagcagctgcactctccatcagtgctgcgtgtgtgtgtgtgtgtgtatgtgtgtgtgtgttcagttgagtgaataaatgtcatcctcttctccatcttcatttccttggccttttcgttctattccattttgcattatggcaggcctagggtgagtaacgtggatcttgatcataaatgcaaaattaaaaaatatcttgacctggttttaaatctggcagtttgagcagatcctatgtctctgagagacacattcctcataatggccagcattttgggctacaaggttttgtggttgatgatgaggatggcatgactgcagagccatcctcatctcattttttcacgtcattttcagtaactttcactcattcaaaggcaggttataagtaagtcctggtagcagcctctatggggagatttgagagtgactaaatcttggtatctgccctcaagaacttacagttaaatggggagacaatgttgtcatgaaaaggtattatagtaaggagagaaggagacatacacaggccttcaggaagagacgacagtttggggtgaggtagttggcataggcttatctgtgatgaagtggcctgggagcaccaaggggatgttgaggctagtctgggaggagcaggagttttgtctagggaacttgtaggaaattcttggagctgaaagtcccacaaagaaggccctggcaccaagggagtcagcaaacttcagattttattctctgggcaggcatttcaagtttccttttgctgtgacatactcatccattagacagcctgatacaggcctgtagcctcttccggccgtgtgtgctggggaagccccaggaaacgcacatgcccacacagggagccaagtcgtagcatttgggccttgatctaccttttctgcatcaatacactcttgagcctttgaaaaaagaacgtttcccactaaaaagaaaatgtggatttttaaaatagggactcttcctaggggaaaaaggggggctgggagtgatagagggtttaaaaaataaacaccttcaaactaacttcttcgaacccttttattcactccctgacgactttgtgctggggttggggtaactgaactgcttatttctgtttaattgcattcaggctggatcttagaagacttttatccttccaccatctctctcagaggaatgagcggggaggttggatttactggtgactgattttctttcatgggccaaggaactgaaagagaatgtgaagcaaggttgtgtcttgcgcatggttaaaaataaagcattgtcctgcttcctaag

SEQ ID NO: 86 - protein, 244 aa, Homo sapiens
MRWCLLLIWAQGLRQAPLASGMMTGTIETTGNISAEKGGSIILQCHLSSTTAQVTQVNWEQQDQLLAICNADLGWHISPSFKDRVAPGPGLGLTLQSLTVNDTGEYFCIYHTYPDGAYTGRIFLEVLESSVAEHGARFQIPLLGAMAATLVVICTAVIVVVALTRKKKALRIHSVEGDLRRKSAGQEEWSPSAPSPPGSCVQAEAAPAGLCGEQRGEDCAELHDYFNVLSYRSLGNCSFFTETG

SEQ ID NO: 87 - DNA, 1398 bp, Homo sapiens
  CDS (1)..(1197)
atgcggccggggggcgcactgctcgccctgctcgccagcctgctgctgctgctgctgctgcgcctgctctggtgcccggcagacgcgcccggccgcgccaggattctggtggaggaaagcagggaggccacccacggcacccccgcagcgctgaggacgctccggagcccggcgaccgcggtaccgcgcgccactaacagcacatatctgaatgagaagtcgctccaactgacggagaaatgcaaaaatctgcaatatggcattgagtctttctctaacaaaacgaaagggtattcagagaacgactaccttcagattatcacagatatacagagttgtccatggaaacggcaagcagaagaatatgcaaattttagagccaaacttgcttcctgctgtgatgctgttcaaaactttgttgtttctcagaataacactccagttgggactaatatgagttacgaggtggaaagcaaaaaagaaatcccaattaagaagaacatttttcatatgtttccagtgtcccagccttttgtggactacccttataatcagtgtgcagtggtcggaaatgggggaattctgaataagtctctctgtggaactgaaatagataaatccgacttcgtttttaggtgtaacctacccccaaccacaggagatgttagtaaagatgttggcagtaaaacaaatcttgtgactataaatccaagcatcataactctgaaatatgggaacttaaaggaaaaaaaagccctatttctggaggacattgcaacctatggagatgcattttttcttctgccagcattttccttcagggccaacacgggtacctctttcaaagtatactacacgctcgaagagtctaaagcaagacaaaaggttctatttttccatcccaagtacctgaaagatctggcccttttctggagaactaaaggtgtgactgcataccgcttgtccaccggcttgatgatcacaagtgttgcagtggaactgtgtaaaaatgtgaagctgtatggattctggcccttctctaaaactgtagaagacatacctgtcagccatcactattatgacaacaagctacctaaacatggtttccatcagatgcccaaagaatacagccagatcctccaacttcacatgaaaggaatcctcaaactgcaatttagcaaatgtgaagtcgcctaaacaaagtatcttaaaatgggaataattttaatataatgcagtaggtgattaacaatgtctccaaacaccaaaggaggtggctaaagagtattttgagatgagccccaaaatttggtttgaccaaagcttccccactcattttgcaatgatggcaagtcattcaatccttctcatcttcattttttctccttataacatgga

SEQ ID NO: 88 - protein, 398 aa, Homo sapiens
MRPGGALLALLASLLLLLLLRLLWCPADAPGRARILVEESREATHGTPAALRTLRSPATAVPRATNSTYLNEKSLQLTEKCKNLQYGIESFSNKTKGYSENDYLQIITDIQSCPWKRQAEEYANFRAKLASCCDAVQNFVVSQNNTPVGTNMSYEVESKKEIPIKKNIFHMFPVSQPFVDYPYNQCAVVGNGGILNKSLCGTEIDKSDFVFRCNLPPTTGDVSKDVGSKTNLVTINPSIITLKYGNLKEKKALFLEDIATYGDAFFLLPAFSFRANTGTSFKVYYTLEESKARQKVLFFHPKYLKDLALFWRTKGVTAYRLSTGLMITSVAVELCKNVKLYGFWPFSKTVEDIPVSHHYYDNKLPKHGFHQMPKEYSQILQLHMKGILKLQFSKCEVA

SEQ ID NO: 89 - DNA, 1866 bp, Homo sapiens
  CDS (289)..(1035)
gcattgctacctgcccttctcaaagcccacatgttgtattttatgcaaatctacagattatctatcattatctaaatgcaggcatctgaaaaccagcagtaatcctgcctctgaagtttatcaggaaaggagcttaaaagagaaccaaattcagcctgtgttggaactctcagtcccagaggggtgtggtttgtagctctccggcctgctgttggacttaggctgtgacccacagaaggacgccagaaagtactcaagacattcacggtgccccggtcagcactcgccatgacgaagacttctacatgcatataccacttccttgttctgagctggtatactttcctcaattattacatctcacaggaaggaaaagacgaggtgaaacccaaaatcttggcaaatggtgcaaggtggaaatatatgacgctgcttaatctgctcaagaacaggactgctgggtttgacatctaccagccaggaagctttaggcagctcttgcagaccattttctacggggtcacctgcctggatgatgtgctgaaaagaaccaaagggggaaaagacattaagttcctaactgccttcagagacctgcttttcaccactctggcttttcctgtatccacgtttgtatttttggcattctggatcctctttctctacaatcgagatctcatttaccccaaggtcctagatactgtcatccccgtgtggctgaatcatgcaatgcacactttcatattccccatcacattggctgaagtcgtcctcaggcctcactcctatccatcaaagaagacaggactcaccttgctggctgctgccagcattgcttacatcagccgcatcctatggctctactttgagacgggtacctgggtgtatcctgtgtttgccaaactcagcctcttgggtctagcagctttcttctctctcagctacgtcttcatcgccagcatctacctacttggagagaagctcaaccactggaaatggggtgacatgaggcagccacggaagaagaggaagtaattgcacaccattttccaagaaccaagaaagaagaaaacacaagagatttttctcatcttttttttttttttctggtggagggaggtggtggaggaacatagcaaagtaggagggacagagagtgatacttaaatttaataagaggttcgtgaaggtagcttaacttgagaactcttggttttttgaaaggttgactgcacatgccaaaaacaactcctgctatctcagaattaattatctttgaccttcgtggaggatggtctctggttaaaatctggccaaagaaactcacataaacttggtgttagagaacatctagagagagagagaggaacttagagtcatttaaactcttcagtttacagagaaggatgctgaggacctagatgagaagttacctgcaaaaggcaaaagggttacttagtgtcagaaccaaggcaatgacttctctctcccagatctcctagctactggtcctgggccatttttttttttttaaataatcccaactttctttaaaagacaagcatttcagtaagctagttattttcatgggttgctcatccatttttttcagtgatctaaaaatgtagggagatggctactactgaagttgtctgtctacttgggataatagcaaattaattgaagacaatgggaaagtaagttataaaaaatactgggaaatctgtttctcttctgagcaagcattcagggcaggtataaacatcaaacatagtgacattgtcaaaacctcttccatttgaacattgattaattcatcaaataaatggtatagtaataaattttgcttgcagaagaaaaaaaaaa

SEQ ID NO: 90 - protein, 248 aa, Homo sapiens
MTKTSTCIYHFLVLSWYTFLNYYISQEGKDEVKPKILANGARWKYMTLLNLLKNRTAGFDIYQPGSFRQLLQTIFYGVTCLDDVLKRTKGGKDIKFLTAFRDLLFTTLAFPVSTFVFLAFWILFLYNRDLIYPKVLDTVIPVWLNHAMHTFIFPITLAEVVLRPHSYPSKKTGLTLLAAASIAYISRILWLYFETGTWVYPVFAKLSLLGLAAFFSLSYVFIASIYLLGEKLNHWKWGDMRQPRKKRK

SEQ ID NO: 91 - DNA, 1812 bp, Homo sapiens
  CDS (289)..(981)
gcattgctacctgcccttctcaaagcccacatgttgtattttatgcaaatctacagattatctatcattatctaaatgcaggcatctgaaaaccagcagtaatcctgcctctgaagtttatcaggaaaggagcttaaaagagaaccaaattcagcctgtgttggaactctcagtcccagaggggtgtggtttgtagctctccggcctgctgttggacttaggctgtgacccacagaaggacgccagaaagtactcaagacattcacggtgccccggtcagcactcgccatgacgaagacttctacatgcatataccacttccttgttctgagctggtatactttcctcaattattacatctcacaggaaggaaaagacgaggtgaaacccaaaatcttggcaaatggtgcaaggtggaaatatatgacgctgcttaatctgctcttgcagaccattttctacggggtcacctgcctggatgatgtgctgaaaagaaccaaagggggaaaagacattaagttcctaactgccttcagagacctgcttttcaccactctggcttttcctgtatccacgtttgtatttttggcattctggatcctctttctctacaatcgagatctcatttaccccaaggtcctagatactgtcatccccgtgtggctgaatcatgcaatgcacactttcatattccccatcacattggctgaagtcgtcctcaggcctcactcctatccatcaaagaagacaggactcaccttgctggctgctgccagcattgcttacatcagccgcatcctatggctctactttgagacgggtacctgggtgtatcctgtgtttgccaaactcagcctcttgggtctagcagctttcttctctctcagctacgtcttcatcgccagcatctacctacttggagagaagctcaaccactggaaatggggtgacatgaggcagccacggaagaagaggaagtaattgcacaccattttccaagaaccaagaaagaagaaaacacaagagatttttctcatcttttttttttttttctggtggagggaggtggtggaggaacatagcaaagtaggagggacagagagtgatacttaaatttaataagaggttcgtgaaggtagcttaacttgagaactcttggttttttgaaaggttgactgcacatgccaaaaacaactcctgctatctcagaattaattatctttgaccttcgtggaggatggtctctggttaaaatctggccaaagaaactcacataaacttggtgttagagaacatctagagagagagagaggaacttagagtcatttaaactcttcagtttacagagaaggatgctgaggacctagatgagaagttacctgcaaaaggcaaaagggttacttagtgtcagaaccaaggcaatgacttctctctcccagatctcctagctactggtcctgggccatttttttttttttaaataatcccaactttctttaaaagacaagcatttcagtaagctagttattttcatgggttgctcatccatttttttcagtgatctaaaaatgtagggagatggctactactgaagttgtctgtctacttgggataatagcaaattaattgaagacaatgggaaagtaagttataaaaaatactgggaaatctgtttctcttctgagcaagcattcagggcaggtataaacatcaaacatagtgacattgtcaaaacctcttccatttgaacattgattaattcatcaaataaatggtatagtaataaattttgcttgcagaagaaaaaaaaaa

SEQ ID NO: 92 - protein, 230 aa, Homo sapiens
MTKTSTCIYHFLVLSWYTFLNYYISQEGKDEVKPKILANGARWKYMTLLNLLLQTIFYGVTCLDDVLKRTKGGKDIKFLTAFRDLLFTTLAFPVSTFVFLAFWILFLYNRDLIYPKVLDTVIPVWLNHAMHTFIFPITLAEVVLRPHSYPSKKTGLTLLAAASIAYISRILWLYFETGTWVYPVFAKLSLLGLAAFFSLSYVFIASIYLLGEKLNHWKWGDMRQPRKKRK

SEQ ID NO: 93 - DNA, 1726 bp, Homo sapiens
  CDS (126)..(1010)
tcccggagagaacgccggtggcggggctggtagcccggcagccgcaggtggggccacgagcgctggctgagggaccgagccggagagccccggagcccccgtaacccgcgcggggagcgcccaggatgccgcgcggggactcggagcaggtgcgctactgcgcgcgcttctcctacctctggctcaagttttcacttatcatctattccaccgtgttctggctgattggggccctggtcctgtctgtgggcatctatgcagaggttgagcggcagaaatataaaacccttgaaagtgccttcctggctccagccatcatcctcatcctcctgggcgtcgtcatgttcatggtctccttcattggtgtgctggcgtccctccgtgacaacctgtaccttctccaagcattcatgtacatccttgggatctgcctcatcatggagctcattggtggcgtggtggccttgaccttccggaaccagaccattgacttcctgaacgacaacattcgaagaggaattgagaactactatgatgatctggacttcaaaaacatcatggactttgttcagaaaaagttcaagtgctgtggcggggaggactaccgagattggagcaagaatcagtaccacgactgcagtgcccctggacccctggcctgtggggtgccctacacctgctgcatcaggaacacgacagaagttgtcaacaccatgtgtggctacaaaactatcgacaaggagcgtttcagtgtgcaggatgtcatctacgtgcggggctgcaccaacgccgtgatcatctggttcatggacaactacaccatcatggcgggcatcctcctgggcatcctgcttccccagttcctgggggtgctgctgacgctgctgtacatcacccgggtggaggacatcatcatggagcactctgtcactgatgggctcctggggcccggtgccaagcccagcgtggaggcggcaggcacgggatgctgcttgtgctaccccaattagggcccagcctgccatggcagctccaacaaggaccgtctgggatagcacctctcagtcaacatcgtggggctggacagggctgcggcccctctgcccacactcagtactgaccaaagccagggctgtgtgtgcctgtgtgtaggtcccacggcctctgcctccccagggagcagagcctgggcctcccctaagaggctttccccgaggcagctctggaatctgtgcccacctggggcctggggaacaaggccctcctttctccaggcctgggctacgggggagggagagcctgaggctctgctcagggcccatttcatctctggcagtgccttggcggtggtattcaaggcagttttgtagcacctgtaattggggagagggagtgtgcccctcggggcaggagggaagggcatctggggaagggcaggagggaagagctgtccatgcagccacgcccatggccaggttggcctcttctcagcctcccaggtgccttgagccctcttgcaagggcggctgcttccttgagcctagtttttttacgtgatttttgtaacattcatttttttgtacagataacaggagtttctgactaatcaaagctggtatttccccgcatgtcttattcttgcccttcccccaaccagtttgttaatcaaacaataaaaacatgttttttttttttttttaaaaaaaaaaaaaaaaaaaaaaaaaaa

SEQ ID NO: 94 - protein, 294 aa, Homo sapiens
MPRGDSEQVRYCARFSYLWLKFSLIIYSTVFWLIGALVLSVGIYAEVERQKYKTLESAFLAPAIILILLGVVMFMVSFIGVLASLRDNLYLLQAFMYILGICLIMELIGGVVALTFRNQTIDFLNDNIRRGIENYYDDLDFKNIMDFVQKKFKCCGGEDYRDWSKNQYHDCSAPGPLACGVPYTCCIRNTTEVVNTMCGYKTIDKERFSVQDVIYVRGCTNAVIIWFMDNYTIMAGILLGILLPQFLGVLLTLLYITRVEDIIMEHSVTDGLLGPGAKPSVEAAGTGCCLCYPN

SEQ ID NO: 95 - DNA, 2255 bp, Homo sapiens
  CDS (257)..(1363)
agctggacggccccgggaggccgcagaccgccgggctccccgaggacacctcgcaccggaggaggagaggaggcagcgcccggccaggctgggagcacctacggccgcgcgggggcgggagccaggtggcctcggcgcgcccgcctcgcccgggcaccgagcaggaagtggctgcggcgcggcctcctcgcggtgcaacagggcggggaggcggccgcagcccgagccggagcccgagcgccgggagcgagacctcatggcagcggtggcgcccgcgggccccggggactccgcctcggccgccctggacgagctgtcactgaatttcacgtacggggcaccaggcgccggcaacggctccctctcgggcgactggtaccgcaggaaccagattcacctttttggagttttgctggctattttaggaaacttggtgatcagtatttctctaaatattcagaaatattctcaccttcagctggcacaacaagagcacccaaggccatacttcaagagtgtgctgtggtggggtggtgtcctgctgatggccgtgggagagacggggaactttgcagcctatggatttgctcccattactctgatcgctccgttaggctgtgtgtctgttacaggtagtgccattatttctgttacatttctgaaagacaatttgagagcctcagacttactcggtacgacactggcatttgcaggaacatatttactggtgaactttgctccaaatataactcaggcaatctcagcaagaacagtacagtattaccttgtcggatggcagttcctgatctatgtgattttagaaatattaattttctgcattctcctgtatttctataaaagaaaaggaatgaagcatatggtgattctgctaaccctggtggcaattctagcctcattgactgttatttcagtaaaggccgtctcaggcatgatcactttttctgtgatggataaaatgcaactaacttaccccattttctatatcatgtttatcatcatgatagcatcttgtgttttccaagtcaagttcctgaatcaagccacgaaactctacaatacgacaacagtggtgccagttaatcatattttctttacaatcagtgccatcattgcaggtatcatattttatcaggaattccttggtgctccttttctcactgtatttatatatctttttgggtgttttctgtcattccttggtgtatttttggtcacaagaaatcgagaaaaggaacatctgcaacagtcttatattgattttggaaatattcctgacacaaccccagagagaaaggcttggagggaaacaaatgttggacaaaatacaaccagattcacatagcttatcctatggaactttgcctgatggaagtgactcaacaaagagccaaagtggagagaagaaagaggtctaaatgctgagaaggatggctgttggcctgttattcgataccacctttttaaaaaattgcacatgttcaatttgtgtcagcagctcttttataagctaacatgtgctagcattcatttcagtcctttcccccacctcagcgtctatggacaatcggggacttcctaagctctgacagtctaatatttccatggaatgtgatttggagtgttccccacaccctggacctctccctagtgattatctagccagctacaccttactcagagcccggctgctctagcaggaatgttgcacagaaacatacatttgcggtttggccacaggtcgcataggtggcttctcccacgggtagtgtcagttgcttcactttaaaaagtcacttcagccccacaacctcactcccaaaagaaaggtttgagagcgctcattttttttctaagacaccttttataagcctccctataaaaatctcacctttcaagtactaagttagaattgcaagtcatcttttctgaaaactaatgctatcaaagtcctcctttgaaaattaagggtctctttaaaattagaatttataaatggcattcagtgatagtgtacaccaaaattaaaagaccttgactggtgggctttttacgtgtaaggaagaggaagtttaagaagtaggactctgcttgtttcagtagcccatgtactaaaataggaacaatgcagagattagcacagcccctgcacaaggctgacacataaattcatgaagcgttagagacaaaaagtaggactaatgtttgtttattttttaataaaaatctagaatggt

SEQ ID NO: 96 - protein, 368 aa, Homo sapiens
MAAVAPAGPGDSASAALDELSLNFTYGAPGAGNGSLSGDWYRRNQIHLFGVLLAILGNLVISISLNIQKYSHLQLAQQEHPRPYFKSVLWWGGVLLMAVGETGNFAAYGFAPITLIAPLGCVSVTGSAIISVTFLKDNLRASDLLGTTLAFAGTYLLVNFAPNITQAISARTVQYYLVGWQFLIYVILEILIFCILLYFYKRKGMKHMVILLTLVAILASLTVISVKAVSGMITFSVMDKMQLTYPIFYIMFIIMIASCVFQVKFLNQATKLYNTTTVVPVNHIFFTISAIIAGIIFYQEFLGAPFLTVFIYLFGCFLSFLGVFLVTRNREKEHLQQSYIDFGNIPDTTPERKAWRETNVGQNTTRFT

SEQ ID NO: 97 - DNA, 6729 bp, Homo sapiens
  CDS (1)..(6420)
atggcgggggcttctcggcacccgactgggacgccccggcagctccttgtggcgctcgcctgcctgctcttgagtcgccccgcgctgcagggacgggcatcctcacttgggaccgagcccgacccggcgctttacctgcccgcccggggtgcgcttgacggcactcgccccgacggccccagcgtgctgattgccaaccctggactccgggtgcccctgggtcgttccctttggctcgacccgctccgggatctggtgattggagtgcagccgggggaccggtgcgaagtcacggtactggacgccctgccgcggctcaagggcgcgctctccccgcgccgcttcccctgcaccttcgggccccgccaagtccagtacactcacttcggctcccacagccccggacgcgcccgggtgctgctgcagctgcgctacgacgccccgactcacactctggtgctgcccttcacgctggcggtggacttggtcttctcccagctggagctggtgacgcgtaacaggcctttggtagtggagaagctgcgaagctggagccgcgccatagacaggagagtgctggacttcgcctccctgaagtctggagccacggccacccgcaggtgccggcttaccccacttcctcacgaggacggccccctgcccaagtacgggcgcttggtggacgcggtgggggcccctctccccaggggcaagggcgtagactgtgaggctttcctccgtgctggggtgcgctatcagcacacagccacctcctcgcccaaccgtgactacgtgcccatgatggtggagctgctggggcctgagggccaagacgctgggtccgcgggtgtgctggtccgcgagcacttccagctgctcgtgaggatccgcggcggagccgagaacacaccgcccaggcccagcttcatggccacgatgatgatggaggtggatccactggtgctgacagccctgacgcctgacgcactggccgcggaggacgtcgagtcagaccctggtgacctggtgttcaacattctgaacgcccccactcacccaccagggcacccggggcaacagggctacgtggtcagcaccgacgaccctctagggcttccagtctccttcttcacccagcaggagctgagggagctgaagattgcctatcagccccctgcagagaactcccatggggagcgcctctttcagctggagctggaggtggtggacggagacggcgccgcctcagacccctttgccttcatggtgacagtgaaatccatgaatactctggtcccagtggctagccataacaggggacttgtgctttttgaaggtcagtcaaggcccttgtccagcacccacagcattcctatcagtgataaagataacctggaagaggtgaaaatggctgcagtcaggggcttgagacatgggcagctggtggtgtttggggcacctgctgggtgcaagtatttcacaccagcggacctggcagcagggcgagtggtgtatcagcatgatggcagcaacacctacagtgacaatatcatcttccggatggaggacgggcaccaccaagtggacttcctctttcccctcaccatcctacctgtggatgatgaaccaccaatggtcaatactaacacaggactctcactcactgaagggcaggtggtccagatctctccctttgtactgagtgctactgatattgactctgaggactcaaccatccactttgtgctggagaaccagcccctaaaaggaaatgaggaagagcctcagtgggagttggcccctggttcctcccactcaggccactacctgggggacctgttgctgcagcaggctgaactacctctctcaactgaagatgaagactggcactacatggaaaaggaagggctttatgagaaagtggtgactgagtggctacagagagacataatggaagggagactcttctaccgccatcttggaccacacagccctcaatctgtaatggtccagctggctttccatgtgcaggatgaccatgacccacccaatctctccaaacagcacattttcaccatcaaggtccaaccagtggatatactgagtccacagctgtatccaggaactacactagaaatgactgtacaagaataccaactcactcacttccagaagaatttcctccgatacattgaccaggactctgatgaccagaacctatggtacaccctactgacactcccgactgacacagatggcaaccaccaagtccgggctggagaaattgtgctcactgattcaccagacacactcatcatgcactttacccaagcccaggtaaatcagcataaagttgcctaccagcctccacagaaattgggtattgcaccacgggttgtgcagtttacttaccaggtggaagatgctgcaggcaatagcgtgccaggcacattcacattattcctgcaacctgtggacaaccagcccccagaagtcaccaacagaggctttgctatcttagagggaggcagctttaacctcagcagtaatgagctgcatgttacagacccagacacagacattgaccaaattgtcttcatattagtccggggtccccaacatggacacttgcagtactttaaaagatgtatggtcccaggggaatctttcatgcaagctgatgttattaacgggagtgtctcttaccagcatggcagagaccagacgactaccagtgacactttccatctggaagtaagtgatggggtgcaccatatacccatcaccatcccaatttctgtgcatcccaatgtggctaacagaagtcctaggatctctctcagaagtagttcattattggatgtttctatagacgtactagagaataaagccactgaaattaccatgggtgtcatccatggcaaaaggaaggatgtaggtgacttgatgctgtctttcattgtaaaggacagccccaaactgggcactattctggtaaatggtttgcccacagaacgattcacccaagaggatctcatcaatgggagagtagcctatgcccacactgcaggtgaagttggttttcaaaagcagcacgatgccttcagcctcatcctctccaaagattcttaccaatgggtagtggggaatagcataatagagaaagtacaggtacaagtaactgtgctgcctgtggacaatgtgggacccaaggtcttcgtcggggagtccttcattgtctatgaaggtgagaagaactccttgaccttacaacatctccatgttgaagatgtggacactcatcaagatgaactcctctgcacagtgactagtcagccagcctctggctacctggaaaagattgcatcagctcctggttcaaaaatgtcccagtctggtagccctatcagtgctttctccctcagagatatccaagtgaggcatatcaattatgtacagagtattcacaagggagtagagccacaagaggaccaattcaccttttattgctctgatggcatcaacttctccccaaatgtcttcttccctataatcatcctacccaccaatgatgagcagcctaaactttttgcccatgagtttaaggtactagaggggatgagcctggtcatagacacccagctgcttaatggagcagatgctgacctgccaccaaatgagctccactttcaactcacagccctccctcggcatggacgaatcatacagcagctggctacaggcagccagcccatccacagcttcaccctcaaggagatccaggaggcctccaccattgtgtatgagcatgatgactcagagacaaaagaggacagttttgaggtctggctgagtgacggcaagcacacaacccacaggaaggtacccattgtagtgaccctagtggatgatgaaactcctcacctgactgtcaacaatgggctgaaggtagagaaaggacactctgagatcatcacaaatcggatcctcaaggccacagatcttgactcagatgataaaagcctcagttttgtcctccattctgggcctcaacaagggcttctacagaggctgagaaaacccagaggagaagtgaggaacaatcttactctgggaatgaactttacccaggatgagattaacagaggcctcatctgctatatccacacaggccaagaagggattgttgacattatcaagtttgatgttactgatggggttaacactttgacagaccactacttctatgtcaccattggcaacttagacagcgtcttccctgaggtaatcagcaaaaggatcaccttgatagaaggtgccagagtgacccttaccaacaatctgcttaccaacagtgacatcaacagctctgatgaacatcactttagcattacacgggctccaagcctgggtcacttagaaagttctgactatgctggggaacccattgcctctttcactcaacttcaattggctagcaacaaaatatcctatgtccatacttcaaatgatgagaaaaagatggacagcttcgaatttcaagtgatcggcgaactctaccctgtgttcagaaccttcaggatcttcatcactgatgtggataataagaaacctatcttgaccatccatagactaacactacagaaagaggatagccaactgatcactctccttgagttgacagtggaagacagtgataccccagatgaccttattctctttaccatcacccaggtccccatgcatggcaagattttgtacaatggtagccgtcccgtgaccactttcaccaagcaagacctgaacaagaacctgattagctacaagcatgacggcagtgagaccactgaagatagtttctccttgactgtgacagacggcactcacactgatttctatgtcctaccagacactgccctggcgacacacaaacctcaagtaatgagggtccagataagatcattagacaataggcttccccagattactaccaacaggggtgccccagccttgaagcgccttcacactggacacatgggcttcctgattaccagcaagtctctgaaggcagaagatcaggacagtccccacaggcttctgaagtataaagtgaccagaggaccagagcatggcttcattatcaaaactggccttggaaaccagagcactcgagtgtttacacaagctgacattgatgagatgaagatatcctatgtcttgaatgagggcagcaacgcatcaaaggacatcttctatttctctgttgaagacaatggaggaaataaactaacaaatcagcctttccatctaaactgggcttggatttgtttggagaaagagtactacattgtggatgaagattccacattcttagaagtgacccttacacgcagaggataccttggagaaacatcatttatcagcattggtaccaaagatgaaactgcaaaaaaagacaaagatttcaaatggaagaccaataaacagatccagttcaatcctggacagactacagccacatggagggtgagaattatacctgacaatgaatatgagacttcagagaccttccagatcattctgtctgaacctctcatggctgtactggagtttccagaaatggcaacggttgaaattgtagaccctggagatgaatcaacagtttatattccagaggcggaatacaaaatagaagaggacattggggaacttttgattccagtaagacgatctggagatgcaagccaggaactaatcgtcatttgctccacacgtcaaggttctgccacaggcacgatttcttccacagtgttattctctgattacatctcacgtccagaagaccacaccagcatcctccactttgacaagaatgagacacagaagacctgccaggtcctgatcattgatgactccctttatgaagaggaggaatccttcagcgtttcacttaggctgccagtgggaggacagctgggagccagattccccaccactaaggtgactattctggctgatcgttatgatgaacctgtcctgcactttggggatgctgaatatcacgtcaatgaaagtgctcgctacgtggaggtttgtgtttggagaagaggcactgatctttcccaaccatcatccatcgccgtgcgctccagaaagtcagagcaggagtcagcagaagctggaacagattatgttggtatcagccgaaacctggactttgctccaggcgtgcgcatgcagacattccaagtgaccatccttgatgacctgggacagcctaccttggaaggcccagagaagtttgaattacttcttcagatgcctatgggtgcagtgcttggagaaccaaataaaactaccattttcatcgaggacaccatcacggactgtaagcagagtgcttgtagttcctttgattgaaagactttaagagggaaaaaaacagccaagatatgtctcctaacaacagaatgaaactctactgtttatagatcttagcaattctgggatatcagtgatattgtactgtcattggtgttatattctggtgatatgtggaaatgtaatttatatgactgcatggagatagaaatatatatacctagaaaacattgagcccacaaataattagactgtgttcatgttctttttctattttgttttactttgtttctgaggcaagtaagaaatccactgtgatcaattaaatcaaaagttaagatcaaagaa

SEQ ID NO: 98 - protein, 2139 aa, Homo sapiens
MAGASRHPTGTPRQLLVALACLLLSRPALQGRASSLGTEPDPALYLPARGALDGTRPDGPSVLIANPGLRVPLGRSLWLDPLRDLVIGVQPGDRCEVTVLDALPRLKGALSPRRFPCTFGPRQVQYTHFGSHSPGRARVLLQLRYDAPTHTLVLPFTLAVDLVFSQLELVTRNRPLVVEKLRSWSRAIDRRVLDFASLKSGATATRRCRLTPLPHEDGPLPKYGRLVDAVGAPLPRGKGVDCEAFLRAGVRYQHTATSSPNRDYVPMMVELLGPEGQDAGSAGVLVREHFQLLVRIRGGAENTPPRPSFMATMMMEVDPLVLTALTPDALAAEDVESDPGDLVFNILNAPTHPPGHPGQQGYVVSTDDPLGLPVSFFTQQELRELKIAYQPPAENSHGERLFQLELEVVDGDGAASDPFAFMVTVKSMNTLVPVASHNRGLVLFEGQSRPLSSTHSIPISDKDNLEEVKMAAVRGLRHGQLVVFGAPAGCKYFTPADLAAGRVVYQHDGSNTYSDNIIFRMEDGHHQVDFLFPLTILPVDDEPPMVNTNTGLSLTEGQVVQISPFVLSATDIDSEDSTIHFVLENQPLKGNEEEPQWELAPGSSHSGHYLGDLLLQQAELPLSTEDEDWHYMEKEGLYEKVVTEWLQRDIMEGRLFYRHLGPHSPQSVMVQLAFHVQDDHDPPNLSKQHIFTIKVQPVDILSPQLYPGTTLEMTVQEYQLTHFQKNFLRYIDQDSDDQNLWYTLLTLPTDTDGNHQVRAGEIVLTDSPDTLIMHFTQAQVNQHKVAYQPPQKLGIAPRVVQFTYQVEDAAGNSVPGTFTLFLQPVDNQPPEVTNRGFAILEGGSFNLSSNELHVTDPDTDIDQIVFILVRGPQHGHLQYFKRCMVPGESFMQADVINGSVSYQHGRDQTTTSDTFHLEVSDGVHHIPITIPISVHPNVANRSPRISLRSSSLLDVSIDVLENKATEITMGVIHGKRKDVGDLMLSFIVKDSPKLGTILVNGLPTERFTQEDLINGRVAYAHTAGEVGFQKQHDAFSLILSKDSYQWVVGNSIIEKVQVQVTVLPVDNVGPKVFVGESFIVYEGEKNSLTLQHLHVEDVDTHQDELLCTVTSQPASGYLEKIASAPGSKMSQSGSPISAFSLRDIQVRHINYVQSIHKGVEPQEDQFTFYCSDGINFSPNVFFPIIILPTNDEQPKLFAHEFKVLEGMSLVIDTQLLNGADADLPPNELHFQLTALPRHGRIIQQLATGSQPIHSFTLKEIQEASTIVYEHDDSETKEDSFEVWLSDGKHTTHRKVPIVVTLVDDETPHLTVNNGLKVEKGHSEIITNRILKATDLDSDDKSLSFVLHSGPQQGLLQRLRKPRGEVRNNLTLGMNFTQDEINRGLICYIHTGQEGIVDIIKFDVTDGVNTLTDHYFYVTIGNLDSVFPEVISKRITLIEGARVTLTNNLLTNSDINSSDEHHFSITRAPSLGHLESSDYAGEPIASFTQLQLASNKISYVHTSNDEKKMDSFEFQVIGELYPVFRTFRIFITDVDNKKPILTIHRLTLQKEDSQLITLLELTVEDSDTPDDLILFTITQVPMHGKILYNGSRPVTTFTKQDLNKNLISYKHDGSETTEDSFSLTVTDGTHTDFYVLPDTALATHKPQVMRVQIRSLDNRLPQITTNRGAPALKRLHTGHMGFLITSKSLKAEDQDSPHRLLKYKVTRGPEHGFIIKTGLGNQSTRVFTQADIDEMKISYVLNEGSNASKDIFYFSVEDNGGNKLTNQPFHLNWAWICLEKEYYIVDEDSTFLEVTLTRRGYLGETSFISIGTKDETAKKDKDFKWKTNKQIQFNPGQTTATWRVRIIPDNEYETSETFQIILSEPLMAVLEFPEMATVEIVDPGDESTVYIPEAEYKIEEDIGELLIPVRRSGDASQELIVICSTRQGSATGTISSTVLFSDYISRPEDHTSILHFDKNETQKTCQVLIIDDSLYEEEESFSVSLRLPVGGQLGARFPTTKVTILADRYDEPVLHFGDAEYHVNESARYVEVCVWRRGTDLSQPSSIAVRSRKSEQESAEAGTDYVGISRNLDFAPGVRMQTFQVTILDDLGQPTLEGPEKFELLLQMPMGAVLGEPNKTTIFIEDTITDCKQSACSSFD

SEQ ID NO: 99 - DNA, 10033 bp, Homo sapiens
  CDS (78)..(9632)
ccaacgggcctcagagggagctggtctatcccggccctgtcattactccactgggttctgatctgctttgccacggcatggaggcagaagatctttcaaaggctgaagacagaaatgaagacccaggttccaaaaatgaagggcagcttgctgctgtgcagcctgatgtcccacatggagggcagtcctccagccccacagctctctgggacatgctggaaaggaagtttctggaataccagcagttgactcacaagagccccattgagcgtcagaagagcctgttgagtcttctccccctattcctaaaggcctgggaacactccgtggggatcatctgctttcccagtctccaaaggctggctgaagacgtgtctgaccagcttgcccagcaactccagaaggcccttgtggggaagcctgcggagcaagctcggttggcagctggacagttgctgtggtggaagggggacgtggatcaggatggctacttgctcctgaagtcagtgtacgtgctcacggggacagactcggagacgctgggcagggttgctgagtctgggcttccagccctgctcctacagtgcctttacctcttctttgtctttcctctggacaaagatgagcttcttgagagtgatcttcaagttcaaaagatgttcgtgcagatgttgctcaatatttgcagtgactctcagggcctggagggactcctctcaggaagtgagctgcagtctctgctgattgccacgacctgccttcgggagcacagctgctgcttctggaaggaacccaccttctgcgtgctaagggcaatctccaaggcccagaacctcagcatcatccagtacctgcaggccacagactgtgtcaggctctccctccagaacctctccaggctcacggacactctccctgcccctgaagtgagcgaggctgtaagcctgatcttgggattcgtgaaggactcctaccccgtctcctcggctctgttcctggagtttgagaattcagagggctatcctctgctgctcaaagtgttacttcggtatgatgggctgacccagagcgaagtggacccgcatctggaggagctccttgggctggtggtgtggctgacaacctgtgggaggtcagagctgaaggtgtttgacagcatcacttaccctcagcttgaaggcttcaagttccatcatgaggcatctggggtgactgttaagaatcttcaggccttccaggtcctacagaatgttttccacaaagccagtgactctgtcctctgcatacaagtcttgtcagtcatcaggaccatgtgggcctggaatgctcgaaacttcttcctgctggagtggaccctgcagcccatctcgcagtttgtagagatcatgcccctgaagccggccccagtgcaggaacacttcttccagcttctagaggccctggtgttcgagctgcactacgtgcctcatgagatcctgcgaaaggtacagcatctgatcaaggagagccctgggccatcctgcaccctcatggccctgcagagcatcctcagcatcgctggtggggaccccctcttcaccgacatcttccgggactcagggctcctgggcctgctactggcacagcttcggaagcaagccaagatcatgaggaagtcaggaaacaaagtgtccactcctggtgttcaggatccagaaagagaactcacctgtgtgatgctgaggattgtagtcacacttctgaaaggctcggtgaggaatgcagttgtcctgaaggaccacggcatggtgcccttcatcaagatcttcctggatgacgagtgctaccgggaggcctcgctcagcatcttggagcagctctcagccatcaacgccgaggagtacatgagcatcattgtgggtgctctatgctcatccactcaaggggagctgcagctgaaactggatctcctgaagtctctgctccggatcctggtgacccccaagggtcgtgctgccttcagagtctccagcgggttcaacgggctgctgtctctgctctctgacctggaaggctccctccaggagcccccgctgcaggcatggggagcagtatcccccagacagaccctggagctggttttgtacactctctgtgctgtgtccgcagcgctgcactgggaccctgtcaatggctacttcttcaggaggaatgggctctttgagaagctggccgaggacctctgcctgctgggctgttttggagccctggaggaagagggcaacctgctgcgctcttgggtggacacaaaggccaggccatttgcagatttgctgggcactgccttttcctccagcggctcactcccaccccggatacagagctgcctccagatccttggctttctggacagcatggccagcggcaccctccacttgcgtggggacctgaaggagtccctgaggaccaagcaggggccggttgtggatgttcagaagggagaaactggcagtgacccccaacgcaacttcaagcagtggccagacctggaggagaggatggatgagggagatgctgcaatcatgcatcccggggtcgtgtgcatcatggtgaggctgctgcctcggttgtaccatgaagatcacccacagctttccgaggagatccagtgctccctggccagtcatatccagtccctggtgaagtcggagaagaaccgccaggtcatgtgcgaagcaggcttgcttgggaccctcatggcctcctgccacagggccctggtcaccagtggcagccccctccactcacgcctcatcaggatctttgagaagctcgcttcccaggccattgaaccggatgtgctaagacagtttctaggtcttggaattccctcatctctgtcggccacaacaaaaatccttgattcatctcacacacacagaggcaaccctgggtgctcagggtcacagactgcacagggcttggctgaggggccctggccagctgccccagatgctgggctgcaccctggagtcacacaggccccgcagcccttgggggaatcccaggattcaactactgctcttcagacggcgctgagcctcatctccatgacctccccacgcaacctgcagcctcagagggcagccctggccccatcgtttgtggaatttgacatgtccgtggaaggttatggctgtttgtttattccaaccctgtccacagttatgggaaccagcactgagtactctgtctctggaggaattgggacaggtgccaccagaccgttccctcctcctggaggtctgaccttctcctgctggttcctgatcagccggcatggagctgccactgagggccacccgctgcgcttcctgacgttggtgcgccacctggccaggactgagcaaccctttgtttgcttctccgtcagcctctgcccagacgacctctccttggttgtttctacagaagagaaggagtttcagcctctggatgtcatggaacctgaggatgactccgagccttctgcaggatgccagcttcaggtcaggtgtggccagctcctggcttgtggtcagtggcatcacttggctgtggttgtcactaaggaaatgaaaaggcattgtacagtttccacctgtctggatggacaggtcattggctctgccaagatgttatacatccaggctctaccagggcctttcctttctatggatccatccgcatttgtggatgtttatggatatattgctactcctcgagtctggaaacaaaagtcttcattaatctggcgtcttggccccacatacctctttgaagaagccatttcaatggaaactctggaagttattaacaaacttggcccaagatattgtggtaacttccaagctgtgcatgtccaaggggaggacctggacagtgaagccacgccctttgttgcagaagaaagagtttcttttggacttcacatagccagctcctctatcaccagtgtagcggacatcagaaatgcttacaatgaggtggacagccgcctgatcgccaaagagatgaacatttcatcccgtgacaatgccatgcccgtgttcttgctgaggaattgtgctggccacctgtcagggtctctgcggaccattggagctgttgctgtgggtcaattaggggtgagggtattccactccagccctgctgccagcagcctggacttcattggcgggcctgccatcctcctgggcctcatctccttagcgacagatgaccataccatgtatgcggctgtgaaagttctgcactcggtcctgaccagtaatgccatgtgtgacttcctgatgcaacacatctgtgggtaccagataatggcgtttctcctgaggaagaaggcctctctcctgaaccatcgaatttttcagctgatcctctcagtggctggcactgtggagctgggcttcaggtcatctgctatcaccaacactggtgtcttccagcacatcctctgcaatttcgagctctggatgaatactgcagacaatctggagctcagcctcttttcccatcttttggaaatccttcaatcaccaagggaaggacccaggaatgctgaagctgcccaccaggcacagcttatacccaagctcatcttcctattcaatgagccgagcctcatcccctccaagatctccaccatcattggcatcctggcctgtcagctgaggggccacttcagcacccaggacttgctcaggattgggctgtttgttgtgtacaccctcaagccttcgtcggtgaatgagaggcagatctgcatggacggagccctggacccttccctgcctgctggaagccaaacatctggaaagacaatctggctcagaaaccagttgctggagatgctgctcagtgtaatatcttccccccagcttcatctgtcctctgagtcaaaggaagagatgtttctgaaactggggcctgactggttcctgctgctcctgcagggccacctgcatgccagcaccactgtgctggcattgaagctgctgctgtactttctggcaagcccctccctccgcacacggtttagagatggcctgtgtgcaggatcctgggtggaacgcagcactgagggcgtggatattgtaatggacaacctgaagagccagtcaccactgcctgagcaaagcccatgcctgcttcctgggttccgtgtcttgaatgactttctggcccaccacgtccacattccagaggtctacctcatcgtctccaccttcttcctgcagacaccactcacagagctgatggacgggcccaaagacagccttgatgccatgcttcagtggctcctgcagaggcaccaccaggaagaagtcctccaggctgggctgtgcacagaaggtgccttgctcctcctggaaatgctgaaggccaccatgagccagcccctggcaggttctgaggatggtgcctgggcacagaccttcccggccagcgtgctgcagttcctcagcctcgtccaccgcacctacccccaggacccagcgtggcgagccccggagttcctccagaccttggccatagccgccttccccctgggagcccaaaagggggttggggctgagtccacccggaacaccagcagtcctgaggccgcagctgaaggcgacagcacagtggagggtctccaggctcccaccaaggcacatcccgcccggaggaagctgagggagttcacgcagctcctcttgagggagctcctgcttggagcctccagccccaagcagtggctgcccctggaggtgctcctggaggcttctccagaccacgccaccagccaacagaagcgagacttccagtccgaggtcctgctttctgctatggaactattccacatgacaagtggaggtgatgcagcgatgttcagagacggcaaagagcctcagccaagtgcagaagctgctgctgccccttctcttgccaacatctcctgcttcacccagaagctggtggagaagctgtacagtgggatgttctcggcagaccccaggcatatcctcctcttcatcctggagcacatcatggtggtcattgagactgcctcttctcaaagggacactgtcctcagcactttatacagcagtttaaataaagtcattctttattgcctatccaagccccagcagtccctctccgaatgcctcggccttctcagcatcctgggctttctgcaggagcactgggatgttgtctttgccacctacaattccaacatcagcttcctcctgtgtctcatgcattgccttttgctactcaatgagagaagttacccagaaggatttggattggagcccaagcctagaatgtctacttatcatcaagtcttcctttccccaaatgaagacgtgaaagaaaaaagagaagacttaccaagtttgagtgatgtccaacacaacatccagaagacagtgcagactctctggcagcagctggtggcacaaaggcagcagaccctggaggatgccttcaagatcgatctctctgtgaaacctggagagagggaagtgaagattgaagaggtcacaccgctctgggaggagacgatgctcaaggcctggcagcattacttagcatctgagaagaagtcactggcaagtcgttcaaatgttgcacaccacagcaaagtcactttgtggagtggaagcctgtcctcagccatgaagctgatgcccgggcggcaggccaaggaccctgagtgcaagacagaggattttgtgtcatgtatagagaactacagaagaagaggacaagagctatatgcatctttatacaaagaccatgtgcaaaggcgaaaatgtggcaacatcaaggcagccaacgcctgggccaggatccaggagcagctttttggggagctgggcttgtggagccagggggaagaaaccaagccctgttccccatgggaactcgactggagagaaggaccagctcgaatgaggaaacgcatcaaacgcttgtctcctttggaggccctgagctcaggaaggcacaaggaaagccaagacaaaaatgatcatatttctcaaacaaatgctgaaaaccaagatgaactgacactgagggaggctgagggcgagccggacgaggtgggggtggactgcacccagctgaccttcttcccagccttacacgaaagtctgcactcagaagacttcttggaactgtgtcgggaaagacaagttattttacaagagcttcttgataaagaaaaggtgacgcagaagttctccctggtgattgtgcagggccacctggtgtcagaaggggtcctgctttttggccaccaacacttctacatctgcgagaacttcacactgtctcccacgggtgatgtctactgtacccgtcactgcttatccaacatcagcgatccgttcattttcaacctgtgcagcaaagacaggtccactgaccattactcgtgccagtgccacagctacgctgacatgcgggagctacggcaggctcgcttcctcctgcaggacatcgccctggagatcttcttccacaatggatattccaagtttcttgtcttctacaacaatgatcggagtaaggcctttaaaagcttctgctctttccaacccagcctgaaggggaaagccacctcggaggacaccctcagtctaaggagataccccggctctgacaggatcatgctgcagaagtggcagaaaagggacatcagcaattttgagtatctcatgtacctcaacaccgcggctgggagaacctgcaatgactacatgcagtacccagtgttcccctgggtcctcgcagactacacctcagagacattgaacttggcaaatccgaagattttccgggatctttcaaagcccatgggggctcagaccaaggaaaggaagctgaaatttatccagaggtttaaagaagttgagaaaactgaaggagacatgactgtccagtgccactactacacccactactcctcggccatcatcgtggcctcctacctggtccggatgccacccttcacccaggccttctgcgctctgcagggcggaagcttcgacgtggcagacagaatgttccacagtgtgaagagcacgtgggagtcggcctccagagagaacatgagtgacgtcagggagctgaccccagagttcttctacctgcctgagttcttaaccaactgcaacggggtagagttcggctgcatgcaggacgggactgtgctaggagacgtgcagctccctccctgggctgatggggaccctcggaaattcatcagcctgcacagaaaggccctggaaagtgactttgtcagtgccaacctccaccattggatagaccttatttttgggtacaagcagcaggggccagccgcagtggatgctgttaatatcttccacccctacttctacggtgacagaatggacctcagcagcatcactgaccccctcatcaaaagcaccatcctggggtttgtcagcaactttggacaggtgcccaaacagctctttaccaaacctcacccagccaggactgcagcagggaagcctctgcctggaaaggatgtctccacccccgtgagcctgcctggccacccacagccctttttctacagcctgcagtcgctgaggccctcccaggtcacggtcaaagatatgtacctcttttctctaggctcagagtcccccaaaggggccattggccacattgtctctactgagaagaccattctggctgtagagaggaacaaagtgctgctgcctcctctctggaacaggaccttcagctggggctttgatgacttcagctgctgcttggggagctacggctccgacaaggtcctgatgacattcgagaacctggctgcctggggccgctgtctgtgcgccgtgtgcccatccccaacaacgattgtcacctctgggaccagcactgtggtgtgtgtgtgggagctcagcatgaccaaaggccgcccgaggggcttgcgcctccggcaggccttgtatggacacacacaggctgtcacgtgcctggcagcgtcagtcaccttcagcctcctggtgagcggctcccaggactgcacctgtatcctgtgggatctggaccacctcacccacgtgacccgcctgcccgcccatcgggaaggcatctcagccatcaccatcagtgacgtctcaggcaccattgtctcctgtgcgggagcacacttgtccctgtggaatgtcaatggacagcccctggccagcatcaccacagcctggggcccagaaggagccataacctgctgctgcctgatggagggcccagcatgggacacaagccagatcatcatcaccgggagtcaagacggcatggtccgggtttggaagactgaggatgtgaagatgtctgttcctggacggccagcaggagaggagcccccggctcagcctccaagcccaagaggccacaagtgggagaagaacctggccttgagtcgagagctggacgttagcattgctttgacagggaagcccagcaaaaccagccccgcagtgactgctctggccgtgtccagaaaccacaccaaactcctggttggtgatgagagggggagaatattctgctggtctgcagatgggtaggaagagagaggcagcagaggctctggcacaacagtgccaggctgagggtggcagaggtgactggggcctgagctctgcctacagaagaaacccccagggcctccttccccacagttctcaaggaagggcctctggcaatcacagctctgcagcccaaccctctccatggccgatgggacttctatgaaaaggatgagcacacacactcggagggctgagcagcacgctggaaactgtgacttggtgatgcccagctgcacacgaaattacacatgactcaccttattaagggctattgcactgaaaaaaaaaaaagatgggtcgcttactggaaattattgtattgtctttattttattaaagcaactatgttttaaatgcaaaaaaaaaaaaaaaaaaaa

SEQ ID NO: 100 - protein, 3184 aa, Homo sapiens
MEAEDLSKAEDRNEDPGSKNEGQLAAVQPDVPHGGQSSSPTALWDMLERKFLEYQQLTHKSPIERQKSLLSLLPLFLKAWEHSVGIICFPSLQRLAEDVSDQLAQQLQKALVGKPAEQARLAAGQLLWWKGDVDQDGYLLLKSVYVLTGTDSETLGRVAESGLPALLLQCLYLFFVFPLDKDELLESDLQVQKMFVQMLLNICSDSQGLEGLLSGSELQSLLIATTCLREHSCCFWKEPTFCVLRAISKAQNLSIIQYLQATDCVRLSLQNLSRLTDTLPAPEVSEAVSLILGFVKDSYPVSSALFLEFENSEGYPLLLKVLLRYDGLTQSEVDPHLEELLGLVVWLTTCGRSELKVFDSITYPQLEGFKFHHEASGVTVKNLQAFQVLQNVFHKASDSVLCIQVLSVIRTMWAWNARNFFLLEWTLQPISQFVEIMPLKPAPVQEHFFQLLEALVFELHYVPHEILRKVQHLIKESPGPSCTLMALQSILSIAGGDPLFTDIFRDSGLLGLLLAQLRKQAKIMRKSGNKVSTPGVQDPERELTCVMLRIVVTLLKGSVRNAVVLKDHGMVPFIKIFLDDECYREASLSILEQLSAINAEEYMSIIVGALCSSTQGELQLKLDLLKSLLRILVTPKGRAAFRVSSGFNGLLSLLSDLEGSLQEPPLQAWGAVSPRQTLELVLYTLCAVSAALHWDPVNGYFFRRNGLFEKLAEDLCLLGCFGALEEEGNLLRSWVDTKARPFADLLGTAFSSSGSLPPRIQSCLQILGFLDSMASGTLHLRGDLKESLRTKQGPVVDVQKGETGSDPQRNFKQWPDLEERMDEGDAAIMHPGVVCIMVRLLPRLYHEDHPQLSEEIQCSLASHIQSLVKSEKNRQVMCEAGLLGTLMASCHRALVTSGSPLHSRLIRIFEKLASQAIEPDVLRQFLGLGIPSSLSATTKILDSSHTHRGNPGCSGSQTAQGLAEGPWPAAPDAGLHPGVTQAPQPLGESQDSTTALQTALSLISMTSPRNLQPQRAALAPSFVEFDMSVEGYGCLFIPTLSTVMGTSTEYSVSGGIGTGATRPFPPPGGLTFSCWFLISRHGAATEGHPLRFLTLVRHLARTEQPFVCFSVSLCPDDLSLVVSTEEKEFQPLDVMEPEDDSEPSAGCQLQVRCGQLLACGQWHHLAVVVTKEMKRHCTVSTCLDGQVIGSAKMLYIQALPGPFLSMDPSAFVDVYGYIATPRVWKQKSSLIWRLGPTYLFEEAISMETLEVINKLGPRYCGNFQAVHVQGEDLDSEATPFVAEERVSFGLHIASSSITSVADIRNAYNEVDSRLIAKEMNISSRDNAMPVFLLRNCAGHLSGSLRTIGAVAVGQLGVRVFHSSPAASSLDFIGGPAILLGLISLATDDHTMYAAVKVLHSVLTSNAMCDFLMQHICGYQIMAFLLRKKASLLNHRIFQLILSVAGTVELGFRSSAITNTGVFQHILCNFELWMNTADNLELSLFSHLLEILQSPREGPRNAEAAHQAQLIPKLIFLFNEPSLIPSKISTIIGILACQLRGHFSTQDLLRIGLFVVYTLKPSSVNERQICMDGALDPSLPAGSQTSGKTIWLRNQLLEMLLSVISSPQLHLSSESKEEMFLKLGPDWFLLLLQGHLHASTTVLALKLLLYFLASPSLRTRFRDGLCAGSWVERSTEGVDIVMDNLKSQSPLPEQSPCLLPGFRVLNDFLAHHVHIPEVYLIVSTFFLQTPLTELMDGPKDSLDAMLQWLLQRHHQEEVLQAGLCTEGALLLLEMLKATMSQPLAGSEDGAWAQTFPASVLQFLSLVHRTYPQDPAWRAPEFLQTLAIAAFPLGAQKGVGAESTRNTSSPEAAAEGDSTVEGLQAPTKAHPARRKLREFTQLLLRELLLGASSPKQWLPLEVLLEASPDHATSQQKRDFQSEVLLSAMELFHMTSGGDAAMFRDGKEPQPSAEAAAAPSLANISCFTQKLVEKLYSGMFSADPRHILLFILEHIMVVIETASSQRDTVLSTLYSSLNKVILYCLSKPQQSLSECLGLLSILGFLQEHWDVVFATYNSNISFLLCLMHCLLLLNERSYPEGFGLEPKPRMSTYHQVFLSPNEDVKEKREDLPSLSDVQHNIQKTVQTLWQQLVAQRQQTLEDAFKIDLSVKPGEREVKIEEVTPLWEETMLKAWQHYLASEKKSLASRSNVAHHSKVTLWSGSLSSAMKLMPGRQAKDPECKTEDFVSCIENYRRRGQELYASLYKDHVQRRKCGNIKAANAWARIQEQLFGELGLWSQGEETKPCSPWELDWREGPARMRKRIKRLSPLEALSSGRHKESQDKNDHISQTNAENQDELTLREAEGEPDEVGVDCTQLTFFPALHESLHSEDFLELCRERQVILQELLDKEKVTQKFSLVIVQGHLVSEGVLLFGHQHFYICENFTLSPTGDVYCTRHCLSNISDPFIFNLCSKDRSTDHYSCQCHSYADMRELRQARFLLQDIALEIFFHNGYSKFLVFYNNDRSKAFKSFCSFQPSLKGKATSEDTLSLRRYPGSDRIMLQKWQKRDISNFEYLMYLNTAAGRTCNDYMQYPVFPWVLADYTSETLNLANPKIFRDLSKPMGAQTKERKLKFIQRFKEVEKTEGDMTVQCHYYTHYSSAIIVASYLVRMPPFTQAFCALQGGSFDVADRMFHSVKSTWESASRENMSDVRELTPEFFYLPEFLTNCNGVEFGCMQDGTVLGDVQLPPWADGDPRKFISLHRKALESDFVSANLHHWIDLIFGYKQQGPAAVDAVNIFHPYFYGDRMDLSSITDPLIKSTILGFVSNFGQVPKQLFTKPHPARTAAGKPLPGKDVSTPVSLPGHPQPFFYSLQSLRPSQVTVKDMYLFSLGSESPKGAIGHIVSTEKTILAVERNKVLLPPLWNRTFSWGFDDFSCCLGSYGSDKVLMTFENLAAWGRCLCAVCPSPTTIVTSGTSTVVCVWELSMTKGRPRGLRLRQALYGHTQAVTCLAASVTFSLLVSGSQDCTCILWDLDHLTHVTRLPAHREGISAITISDVSGTIVSCAGAHLSLWNVNGQPLASITTAWGPEGAITCCCLMEGPAWDTSQIIITGSQDGMVRVWKTEDVKMSVPGRPAGEEPPAQPPSPRGHKWEKNLALSRELDVSIALTGKPSKTSPAVTALAVSRNHTKLLVGDERGRIFCWSADG

SEQ ID NO: 101 - DNA, 591 bp, Homo sapiens
  CDS (26)..(286)
cagaacggccgatctccagcccaagatgattccagcagtggtcttgctcttactccttttggttgaacaagcagcggccctgggagagcctcagctctgctatatcctggatgccatcctgtttctgtatggaattgtcctcaccctcctctactgtcgactgaagatccaagtgcgaaaggcagctataaccagctatgagaaatcagatggtgtttacacgggcctgagcaccaggaaccaggagacttacgagactctgaagcatgagaaaccaccacagtagctttagaatagatgcggtcatattcttctttggcttctggttcttccagccctcatggttggcatcacatatgcctgcatgccattaacaccagctggccctacccctataatgatcctgtgtcctaaattaatatacaccagtggttcctcctccctgttaaagactaatgctcagatgctgtttacggatatttatattctagtctcactctcttgtcccacccttcttctcttccccattcccaactccagctaaaatatgggaagggagaacccccaataaaactgccatggactggactc

SEQ ID NO: 102 - protein, 86 aa, Homo sapiens
MIPAVVLLLLLLVEQAAALGEPQLCYILDAILFLYGIVLTLLYCRLKIQVRKAAITSYEKSDGVYTGLSTRNQETYETLKHEKPPQ

SEQ ID NO: 103 - DNA, 3477 bp, Homo sapiens
  CDS (327)..(1220)
ggcccggccccgccccgcccgccggccgcggcaaagccgcatcctcccggagcagaaccgctccccgccggctgtccgcaacctccgccagcgtcggtccctgggcaggtgtggtgcagctggaaaaagaaaggctgctgctcggcgccctcgctgcgcccgcctgccggggtcggacgtcggcgatgctgtggctccaggtggaatgcatccttgggacatctttgcatagccccatctaggaagaagttctgtgatgtgtgaactgtgagtttactcaaacaagtccaactctttataagacataggtagacgtcaggtctggaatggaagagccaacagcagtagaaggccaggtccagcttccaagcccccaccagggctctctcaggaaggctgtggctgctgccctggcgctggatggggaatccacaatggggcacaggaaaaagaagaggaaagagtcacgcccagaatccatcatcatctaccgctcagacaatgagaaaacagatgaggagcccggagaatcagaaggtggagatcagcctaaagaggaggagggagatgatttcctagactatcctgtggatgatgatatgtggaacctgcctctggacagccgctacgtcaccttaactgggaccatcacacgagggaagaaaaagggtcagatggtggacatccatgtcacattgacagagaaagagctgcaggaactgaccaaacctaaagagtcatcaagggaaacgacgcctgaaggaagaatggcctgccagatgggagctgaccgtgggccccatgtggtcctctggacgctgatctgcctgcctgtggttttcatcctttcttttgttgtctctttctactacggcactatcacctggtacaacatcttcctcgtgtataatgaggaaaggaccttctggcacaagatctcgtattgcccttgcctcgttctcttctatccagtgctcatcatggccatggcttcttccctcggcctctacgctgctgtggtccagctctcgtggtcctgggaagcatggtggcaagctgcccgggacatggagaaaggcttctgtggctggctctgcagcaagctgggtctggaggactgttctccctacagcattgtggagttgcttgaatccgacaatatctcaagcactctctccaacaaggaccccatccaagaagtagaaacctccacggtctaaactcccaacaacttactccctcctctggccccagtagcctatatatcatcttaaaattccagcagattatttctttaaattaccccctactctccgcagttcttctgggaaatcagagtccatactgatcagttttaccatcttgagggttccaggagggcatggagcagacaagcaattgtgccaaagcagttcacccaatggacaaactctttttgattccctgccctaaaatcaccatttatttaggacaatggaactctgctgtgtgtcgttttgggagcctggaagtgttactggtgcctggaactgaggggagtatgtgactaaatgtgtcagggagaataaagaacctcggggtaaccaaatccaccaagataatagacagggatggagtgagacatttaggaagctggactaccacagtgtagcagaaggtaaagatttgtgtgtatcatttagatttagatttagctgcatagaattaaaaccctaaaatatcagtggcttaaacaagatagaagtgtatttctttcttgtgcagaagaagtctggaggcagaccatcctgggaccctgtgaagtaatccaggtcccaggcttcttctatttctctaccattagtaggatgtgacccttctcacccttatccccaacatcccagtgctgattacatcttcagccatcacatccatgtttctgataaaatagaggaaagggcagagaagcacacacccttcctgttcaaggagacttcccagaagtcccactcgattcttcttatatctcattggcaagacctcagtcacatgatgtcatgagcaaaagaggctggaaatgtagttgtttggctgggtagctatattctcagctaaatactgggttcacgctaattggcaagaaaaaggaagaatggttatttgggttttgttttgttttgttttgtttcgctttagagacggagtctcactctgttgccgaggctggagtgcagtggcactatctcggctcactgcaaccttcgcctcctgggttcaagcaattcttgtgccttggcctccccagtagctgggattacaggtgcgtgccaccatacccggctaatttttgtattttttttttagtagagatggggtttcaccatgtgcccaggctggtcttgaactcctgacctcaggtgatccgcctgcctcggcctcccaaaatgctgggattgtaggcaagaatggttatcttggtaggcaagtcagaatctttgcctcacaatgatcatttaaatacattcagaacccccaaactgctaatatggttttatttatttatttattcattcatttgtttattcatttatttatttaggcctgaatcttacacagagaatttatatatagatattagctacatatactttgaatatgctatacatcgatattagcacctcacgtactttgcaattaagcttctgtaatgtcatgtgatttgtttttggaaaggaatagtggacaggagagtacaatttataatagtagcataactctttgtcctggtggtggaggtgggacgaggtggtgatatttaacctagattaaagaccaggaagggaggaattgcatctgccaaagtttcctccaacagcgatcagtagccctaagtacaaagaagccagatttagccttctgttgtttggcaaaacctcactcagagctttactccctcagacctttctgagtttaaccacagacatgatctttgctgtgctgagaaacttgtgtctacctggcctgtagggagtgtaaactagattaatacagattaacagactctgaacttaaaaaaaaaaatcactcctaagggtgtccttctaatttcaaaatatcaactcctaagaggtcagcagaatttggagatttgggtccttataagaatagctggtgctcttttcttgttcatgtctcaaaacaaagctgttgagagaactgctgcgatgaatcaaaccagaggagtttgtcatgctccccacagagagcccaggacatttgcctgatgtatggtgctgagctccaccttcagaggaactctctcttttttttttttttaaataactattattagcttgacaagaaaaaaaaagtgcccaacagttttagtgttaatcttggtgctctatggtgcattagcagagatatgaacaattaaatgaagacaaagaaaataaaaataaagtctgattaacttttgctcaaaaaaaaaaaaaaaaa

SEQ ID NO: 104 - protein, 297 aa, Homo sapiens
MEEPTAVEGQVQLPSPHQGSLRKAVAAALALDGESTMGHRKKKRKESRPESIIIYRSDNEKTDEEPGESEGGDQPKEEEGDDFLDYPVDDDMWNLPLDSRYVTLTGTITRGKKKGQMVDIHVTLTEKELQELTKPKESSRETTPEGRMACQMGADRGPHVVLWTLICLPVVFILSFVVSFYYGTITWYNIFLVYNEERTFWHKISYCPCLVLFYPVLIMAMASSLGLYAAVVQLSWSWEAWWQAARDMEKGFCGWLCSKLGLEDCSPYSIVELLESDNISSTLSNKDPIQEVETSTV

SEQ ID NO: 105 - DNA, 3391 bp, Homo sapiens
  CDS (241)..(1134)
ggcccggccccgccccgcccgccggccgcggcaaagccgcatcctcccggagcagaaccgctccccgccggctgtccgcaacctccgccagcgtcggtccctgggcaggtgtgggtggaatgcatccttgggacatctttgcatagccccatctaggaagaagttctgtgatgtgtgaactgtgagtttactcaaacaagtccaactctttataagacataggtagacgtcaggtctggaatggaagagccaacagcagtagaaggccaggtccagcttccaagcccccaccagggctctctcaggaaggctgtggctgctgccctggcgctggatggggaatccacaatggggcacaggaaaaagaagaggaaagagtcacgcccagaatccatcatcatctaccgctcagacaatgagaaaacagatgaggagcccggagaatcagaaggtggagatcagcctaaagaggaggagggagatgatttcctagactatcctgtggatgatgatatgtggaacctgcctctggacagccgctacgtcaccttaactgggaccatcacacgagggaagaaaaagggtcagatggtggacatccatgtcacattgacagagaaagagctgcaggaactgaccaaacctaaagagtcatcaagggaaacgacgcctgaaggaagaatggcctgccagatgggagctgaccgtgggccccatgtggtcctctggacgctgatctgcctgcctgtggttttcatcctttcttttgttgtctctttctactacggcactatcacctggtacaacatcttcctcgtgtataatgaggaaaggaccttctggcacaagatctcgtattgcccttgcctcgttctcttctatccagtgctcatcatggccatggcttcttccctcggcctctacgctgctgtggtccagctctcgtggtcctgggaagcatggtggcaagctgcccgggacatggagaaaggcttctgtggctggctctgcagcaagctgggtctggaggactgttctccctacagcattgtggagttgcttgaatccgacaatatctcaagcactctctccaacaaggaccccatccaagaagtagaaacctccacggtctaaactcccaacaacttactccctcctctggccccagtagcctatatatcatcttaaaattccagcagattatttctttaaattaccccctactctccgcagttcttctgggaaatcagagtccatactgatcagttttaccatcttgagggttccaggagggcatggagcagacaagcaattgtgccaaagcagttcacccaatggacaaactctttttgattccctgccctaaaatcaccatttatttaggacaatggaactctgctgtgtgtcgttttgggagcctggaagtgttactggtgcctggaactgaggggagtatgtgactaaatgtgtcagggagaataaagaacctcggggtaaccaaatccaccaagataatagacagggatggagtgagacatttaggaagctggactaccacagtgtagcagaaggtaaagatttgtgtgtatcatttagatttagatttagctgcatagaattaaaaccctaaaatatcagtggcttaaacaagatagaagtgtatttctttcttgtgcagaagaagtctggaggcagaccatcctgggaccctgtgaagtaatccaggtcccaggcttcttctatttctctaccattagtaggatgtgacccttctcacccttatccccaacatcccagtgctgattacatcttcagccatcacatccatgtttctgataaaatagaggaaagggcagagaagcacacacccttcctgttcaaggagacttcccagaagtcccactcgattcttcttatatctcattggcaagacctcagtcacatgatgtcatgagcaaaagaggctggaaatgtagttgtttggctgggtagctatattctcagctaaatactgggttcacgctaattggcaagaaaaaggaagaatggttatttgggttttgttttgttttgttttgtttcgctttagagacggagtctcactctgttgccgaggctggagtgcagtggcactatctcggctcactgcaaccttcgcctcctgggttcaagcaattcttgtgccttggcctccccagtagctgggattacaggtgcgtgccaccatacccggctaatttttgtattttttttttagtagagatggggtttcaccatgtgcccaggctggtcttgaactcctgacctcaggtgatccgcctgcctcggcctcccaaaatgctgggattgtaggcaagaatggttatcttggtaggcaagtcagaatctttgcctcacaatgatcatttaaatacattcagaacccccaaactgctaatatggttttatttatttatttattcattcatttgtttattcatttatttatttaggcctgaatcttacacagagaatttatatatagatattagctacatatactttgaatatgctatacatcgatattagcacctcacgtactttgcaattaagcttctgtaatgtcatgtgatttgtttttggaaaggaatagtggacaggagagtacaatttataatagtagcataactctttgtcctggtggtggaggtgggacgaggtggtgatatttaacctagattaaagaccaggaagggaggaattgcatctgccaaagtttcctccaacagcgatcagtagccctaagtacaaagaagccagatttagccttctgttgtttggcaaaacctcactcagagctttactccctcagacctttctgagtttaaccacagacatgatctttgctgtgctgagaaacttgtgtctacctggcctgtagggagtgtaaactagattaatacagattaacagactctgaacttaaaaaaaaaaatcactcctaagggtgtccttctaatttcaaaatatcaactcctaagaggtcagcagaatttggagatttgggtccttataagaatagctggtgctcttttcttgttcatgtctcaaaacaaagctgttgagagaactgctgcgatgaatcaaaccagaggagtttgtcatgctccccacagagagcccaggacatttgcctgatgtatggtgctgagctccaccttcagaggaactctctcttttttttttttttaaataactattattagcttgacaagaaaaaaaaagtgcccaacagttttagtgttaatcttggtgctctatggtgcattagcagagatatgaacaattaaatgaagacaaagaaaataaaaataaagtctgattaacttttgctcaaaaaaaaaaaaaaaaa

SEQ ID NO: 106 - protein, 297 aa, Homo sapiens; identical to SEQ ID NO: 104

SEQ ID NO: 107 - DNA, 3387 bp, Homo sapiens
  CDS (237)..(1130)
ggcccggccccgccccgcccgccggccgcggcaaagccgcatcctcccggagcagaaccgctccccgccggctgtccgcaacctccgccagcgtcggtccctgggcaggtgtggaatgcatccttgggacatctttgcatagccccatctaggaagaagttctgtgatgtgtgaactgtgagtttactcaaacaagtccaactctttataagacataggtagacgtcaggtctggaatggaagagccaacagcagtagaaggccaggtccagcttccaagcccccaccagggctctctcaggaaggctgtggctgctgccctggcgctggatggggaatccacaatggggcacaggaaaaagaagaggaaagagtcacgcccagaatccatcatcatctaccgctcagacaatgagaaaacagatgaggagcccggagaatcagaaggtggagatcagcctaaagaggaggagggagatgatttcctagactatcctgtggatgatgatatgtggaacctgcctctggacagccgctacgtcaccttaactgggaccatcacacgagggaagaaaaagggtcagatggtggacatccatgtcacattgacagagaaagagctgcaggaactgaccaaacctaaagagtcatcaagggaaacgacgcctgaaggaagaatggcctgccagatgggagctgaccgtgggccccatgtggtcctctggacgctgatctgcctgcctgtggttttcatcctttcttttgttgtctctttctactacggcactatcacctggtacaacatcttcctcgtgtataatgaggaaaggaccttctggcacaagatctcgtattgcccttgcctcgttctcttctatccagtgctcatcatggccatggcttcttccctcggcctctacgctgctgtggtccagctctcgtggtcctgggaagcatggtggcaagctgcccgggacatggagaaaggcttctgtggctggctctgcagcaagctgggtctggaggactgttctccctacagcattgtggagttgcttgaatccgacaatatctcaagcactctctccaacaaggaccccatccaagaagtagaaacctccacggtctaaactcccaacaacttactccctcctctggccccagtagcctatatatcatcttaaaattccagcagattatttctttaaattaccccctactctccgcagttcttctgggaaatcagagtccatactgatcagttttaccatcttgagggttccaggagggcatggagcagacaagcaattgtgccaaagcagttcacccaatggacaaactctttttgattccctgccctaaaatcaccatttatttaggacaatggaactctgctgtgtgtcgttttgggagcctggaagtgttactggtgcctggaactgaggggagtatgtgactaaatgtgtcagggagaataaagaacctcggggtaaccaaatccaccaagataatagacagggatggagtgagacatttaggaagctggactaccacagtgtagcagaaggtaaagatttgtgtgtatcatttagatttagatttagctgcatagaattaaaaccctaaaatatcagtggcttaaacaagatagaagtgtatttctttcttgtgcagaagaagtctggaggcagaccatcctgggaccctgtgaagtaatccaggtcccaggcttcttctatttctctaccattagtaggatgtgacccttctcacccttatccccaacatcccagtgctgattacatcttcagccatcacatccatgtttctgataaaatagaggaaagggcagagaagcacacacccttcctgttcaaggagacttcccagaagtcccactcgattcttcttatatctcattggcaagacctcagtcacatgatgtcatgagcaaaagaggctggaaatgtagttgtttggctgggtagctatattctcagctaaatactgggttcacgctaattggcaagaaaaaggaagaatggttatttgggttttgttttgttttgttttgtttcgctttagagacggagtctcactctgttgccgaggctggagtgcagtggcactatctcggctcactgcaaccttcgcctcctgggttcaagcaattcttgtgccttggcctccccagtagctgggattacaggtgcgtgccaccatacccggctaatttttgtattttttttttagtagagatggggtttcaccatgtgcccaggctggtcttgaactcctgacctcaggtgatccgcctgcctcggcctcccaaaatgctgggattgtaggcaagaatggttatcttggtaggcaagtcagaatctttgcctcacaatgatcatttaaatacattcagaacccccaaactgctaatatggttttatttatttatttattcattcatttgtttattcatttatttatttaggcctgaatcttacacagagaatttatatatagatattagctacatatactttgaatatgctatacatcgatattagcacctcacgtactttgcaattaagcttctgtaatgtcatgtgatttgtttttggaaaggaatagtggacaggagagtacaatttataatagtagcataactctttgtcctggtggtggaggtgggacgaggtggtgatatttaacctagattaaagaccaggaagggaggaattgcatctgccaaagtttcctccaacagcgatcagtagccctaagtacaaagaagccagatttagccttctgttgtttggcaaaacctcactcagagctttactccctcagacctttctgagtttaaccacagacatgatctttgctgtgctgagaaacttgtgtctacctggcctgtagggagtgtaaactagattaatacagattaacagactctgaacttaaaaaaaaaaatcactcctaagggtgtccttctaatttcaaaatatcaactcctaagaggtcagcagaatttggagatttgggtccttataagaatagctggtgctcttttcttgttcatgtctcaaaacaaagctgttgagagaactgctgcgatgaatcaaaccagaggagtttgtcatgctccccacagagagcccaggacatttgcctgatgtatggtgctgagctccaccttcagaggaactctctcttttttttttttttaaataactattattagcttgacaagaaaaaaaaagtgcccaacagttttagtgttaatcttggtgctctatggtgcattagcagagatatgaacaattaaatgaagacaaagaaaataaaaataaagtctgattaacttttgctcaaaaaaaaaaaaaaaaa

SEQ ID NO: 108 - protein, 297 aa, Homo sapiens; identical to SEQ ID NO: 104

SEQ ID NO: 109 - DNA, 3385 bp, Homo sapiens
  CDS (235)..(1128)
ggcccggccccgccccgcccgccggccgcggcaaagccgcatcctcccggagcagaaccgctccccgccggctgtccgcaacctccgccagcgtcggtccctgggcaggtggaatgcatccttgggacatctttgcatagccccatctaggaagaagttctgtgatgtgtgaactgtgagtttactcaaacaagtccaactctttataagacataggtagacgtcaggtctggaatggaagagccaacagcagtagaaggccaggtccagcttccaagcccccaccagggctctctcaggaaggctgtggctgctgccctggcgctggatggggaatccacaatggggcacaggaaaaagaagaggaaagagtcacgcccagaatccatcatcatctaccgctcagacaatgagaaaacagatgaggagcccggagaatcagaaggtggagatcagcctaaagaggaggagggagatgatttcctagactatcctgtggatgatgatatgtggaacctgcctctggacagccgctacgtcaccttaactgggaccatcacacgagggaagaaaaagggtcagatggtggacatccatgtcacattgacagagaaagagctgcaggaactgaccaaacctaaagagtcatcaagggaaacgacgcctgaaggaagaatggcctgccagatgggagctgaccgtgggccccatgtggtcctctggacgctgatctgcctgcctgtggttttcatcctttcttttgttgtctctttctactacggcactatcacctggtacaacatcttcctcgtgtataatgaggaaaggaccttctggcacaagatctcgtattgcccttgcctcgttctcttctatccagtgctcatcatggccatggcttcttccctcggcctctacgctgctgtggtccagctctcgtggtcctgggaagcatggtggcaagctgcccgggacatggagaaaggcttctgtggctggctctgcagcaagctgggtctggaggactgttctccctacagcattgtggagttgcttgaatccgacaatatctcaagcactctctccaacaaggaccccatccaagaagtagaaacctccacggtctaaactcccaacaacttactccctcctctggccccagtagcctatatatcatcttaaaattccagcagattatttctttaaattaccccctactctccgcagttcttctgggaaatcagagtccatactgatcagttttaccatcttgagggttccaggagggcatggagcagacaagcaattgtgccaaagcagttcacccaatggacaaactctttttgattccctgccctaaaatcaccatttatttaggacaatggaactctgctgtgtgtcgttttgggagcctggaagtgttactggtgcctggaactgaggggagtatgtgactaaatgtgtcagggagaataaagaacctcggggtaaccaaatccaccaagataatagacagggatggagtgagacatttaggaagctggactaccacagtgtagcagaaggtaaagatttgtgtgtatcatttagatttagatttagctgcatagaattaaaaccctaaaatatcagtggcttaaacaagatagaagtgtatttctttcttgtgcagaagaagtctggaggcagaccatcctgggaccctgtgaagtaatccaggtcccaggcttcttctatttctctaccattagtaggatgtgacccttctcacccttatccccaacatcccagtgctgattacatcttcagccatcacatccatgtttctgataaaatagaggaaagggcagagaagcacacacccttcctgttcaaggagacttcccagaagtcccactcgattcttcttatatctcattggcaagacctcagtcacatgatgtcatgagcaaaagaggctggaaatgtagttgtttggctgggtagctatattctcagctaaatactgggttcacgctaattggcaagaaaaaggaagaatggttatttgggttttgttttgttttgttttgtttcgctttagagacggagtctcactctgttgccgaggctggagtgcagtggcactatctcggctcactgcaaccttcgcctcctgggttcaagcaattcttgtgccttggcctccccagtagctgggattacaggtgcgtgccaccatacccggctaatttttgtattttttttttagtagagatggggtttcaccatgtgcccaggctggtcttgaactcctgacctcaggtgatccgcctgcctcggcctcccaaaatgctgggattgtaggcaagaatggttatcttggtaggcaagtcagaatctttgcctcacaatgatcatttaaatacattcagaacccccaaactgctaatatggttttatttatttatttattcattcatttgtttattcatttatttatttaggcctgaatcttacacagagaatttatatatagatattagctacatatactttgaatatgctatacatcgatattagcacctcacgtactttgcaattaagcttctgtaatgtcatgtgatttgtttttggaaaggaatagtggacaggagagtacaatttataatagtagcataactctttgtcctggtggtggaggtgggacgaggtggtgatatttaacctagattaaagaccaggaagggaggaattgcatctgccaaagtttcctccaacagcgatcagtagccctaagtacaaagaagccagatttagccttctgttgtttggcaaaacctcactcagagctttactccctcagacctttctgagtttaaccacagacatgatctttgctgtgctgagaaacttgtgtctacctggcctgtagggagtgtaaactagattaatacagattaacagactctgaacttaaaaaaaaaaatcactcctaagggtgtccttctaatttcaaaatatcaactcctaagaggtcagcagaatttggagatttgggtccttataagaatagctggtgctcttttcttgttcatgtctcaaaacaaagctgttgagagaactgctgcgatgaatcaaaccagaggagtttgtcatgctccccacagagagcccaggacatttgcctgatgtatggtgctgagctccaccttcagaggaactctctcttttttttttttttaaataactattattagcttgacaagaaaaaaaaagtgcccaacagttttagtgttaatcttggtgctctatggtgcattagcagagatatgaacaattaaatgaagacaaagaaaataaaaataaagtctgattaacttttgctcaaaaaaaaaaaaaaaaa

SEQ ID NO: 110 - protein, 297 aa, Homo sapiens; identical to SEQ ID NO: 104

SEQ ID NO: 111 - DNA, 3060 bp, Homo sapiens
  CDS (242)..(1942)
acacagagccgcctttcagccgcccgagaactgcccgccgcactccgcgactgcggcgcctgctctcgggccggggtctgcgcgcaccacgcggccggcagaaagggtaagagaagggaaccccgctttgcagggctccaacttcggcggacgcgttacggcgagggcgaaatgagtcggccgtgaacggtgtttcctgttccgaatcccgagagccctggaaagttttgaaggaggaggcatggcccggcagccttatcgttttccccaggcaaggattccggagagaggatcaggtgttttcaggttaaccgtcagaaacgcaatggcacatcgtgattctgagatgaaagaagaatgtctaagggaagacctgaagttttacttcatgagcccttgtgaaaaataccgagccagacgccagattccgtggaaactgggtttgcagattttgaagatagtcatggtcaccacacagcttgttcgttttggtttaagtaaccagctggtggttgctttcaaagaagataacactgttgcttttaagcacttgtttttgaaaggatattctggtacagatgaagatgactacagctgcagtgtatatactcaagaggatgcctatgagagcatcttttttgctattaatcagtatcatcagctaaaggacattaccctggggacccttggttatggagaaaatgaagacaatagaattggcttaaaagtctgtaagcagcattacaagaaagggaccatgtttccttctaatgagacactgaatattgacaacgacgttgagctcgattgtgttcaattagaccttcaggacctctccaagaagcctccggactggaagaactcatcattcttcagactggaattttatcggctcttacaggttgaaatctcctttcatcttaaaggcattgacctacagacaattcattcccgtgagttaccagactgttatgtctttcagaatacgattatctttgacaataaagctcacagtggcaaaatcaaaatctattttgacagtgatgccaaaattgaagaatgtaaagacttgaacatatttggatctactcagaaaaatgctcagtatgtcctggtgtttgatgcatttgtcattgtgatttgcttggcatctcttattctgtgtacaagatccattgttcttgctctaaggttacggaagagatttctaaatttcttcctggagaagtacaagcggcctgtgtgtgacaccgaccagtgggagttcatcaacggctggtatgtcctggtgattatcagcgacctaatgacaatcattggctccatattaaaaatggaaatcaaagcaaagaatctcacaaactatgatctctgcagcatttttcttggaacctctacgctcttggtttgggttggagtcatcagatacctgggttatttccaggcatataatgtgctgattttaacaatgcaggcctcactgccaaaagttcttcggttttgtgcttgtgctggtatgatttatctgggttacacattctgtggctggattgtcttaggaccataccatgacaagtttgaaaatctgaacacagttgctgagtgtctgttttctctggtcaacggtgatgacatgtttgcaacctttgcccaaatccagcagaagagcatcttggtgtggctgttcagtcgtctgtatttatattccttcatcagcctttttatatatatgattctcagtctttttattgcacttattacagattcttatgacaccattaagaaattccaacagaatgggtttcctgaaacggatttgcaggaattcctgaaggaatgcagtagcaaagaagagtatcagaaagagtcctcagccttcctgtcctgcatctgctgtcggaggaggaaaagaagtgatgatcacttgatacctattagctaaagttctgctaaagatgattaaagttcaggcatccttatccagcggctgagcagaggaaccccaaatgacttggacaagcagttccaaaatgactctcttatttaattgtggagtgggaaagaggactcacagttagccagctgaccatgactgaagttccagctttactttttataaacttgaatgataaagaatagaccatgggctactactgggcattagtgcaatataacagcgataataaaattctctattagtctgttaatttatgacatgatctcggaatggaaaaagatcatttcagagtgtgcgaaataatagtctttaaccatgtaattaaatatgtgtgtttattgtcaaataaggatttgttttaaaggtgattcttgggtttgaagacatttgttaattcatggtctgtacagaaatgaagctggttgcaataccaatctagagagtccaagctggcgaactattaagctgtttaaagatcacccttggcctggcacagtggttcacacctgtaatcccagcactttgggaggcctaggcaggcagactgagctcaggagcttgagaccagcctgggcaacatggcaaaaacccacctctacaaaaagtacaaaaattagtcgggcgtgatggcaggcatctgtagtcccagctacttgggaagctgaagtgggaggatcacctgagctctggaggtggaggctgccatgagccatgatcgtgccactacactccagcctgggtgacagagtgagatcctgtctcaaaaaaaaaaaaaaatcacccttaaatcaacaaaaagacctcatgctcatgcagtggacatttcttggcctgttttcctgtgggttttcttcagcatgatatgaagcaactgttggcatagccagtgggataaataagaaatggaatcatttggctgcctcgtcacttgtgctaatggtcagttgtacacacatgacatgtggaagtgacctgtagcagcggtcactcattttaacaattgaactctgctgggttgggtatttacctttgtctagaaaagaaatatgatatattttctctaaataaatttattttcatcattccaaaaaaaaaaaaaaaaa

SEQ ID NO: 112 - protein, 566 aa, Homo sapiens
MARQPYRFPQARIPERGSGVFRLTVRNAMAHRDSEMKEECLREDLKFYFMSPCEKYRARRQIPWKLGLQILKIVMVTTQLVRFGLSNQLVVAFKEDNTVAFKHLFLKGYSGTDEDDYSCSVYTQEDAYESIFFAINQYHQLKDITLGTLGYGENEDNRIGLKVCKQHYKKGTMFPSNETLNIDNDVELDCVQLDLQDLSKKPPDWKNSSFFRLEFYRLLQVEISFHLKGIDLQTIHSRELPDCYVFQNTIIFDNKAHSGKIKIYFDSDAKIEECKDLNIFGSTQKNAQYVLVFDAFVIVICLASLILCTRSIVLALRLRKRFLNFFLEKYKRPVCDTDQWEFINGWYVLVIISDLMTIIGSILKMEIKAKNLTNYDLCSIFLGTSTLLVWVGVIRYLGYFQAYNVLILTMQASLPKVLRFCACAGMIYLGYTFCGWIVLGPYHDKFENLNTVAECLFSLVNGDDMFATFAQIQQKSILVWLFSRLYLYSFISLFIYMILSLFIALITDSYDTIKKFQQNGFPETDLQEFLKECSSKEEYQKESSAFLSCICCRRRKRSDDHLIPIS

SEQ ID NO: 113 - DNA, 649 bp, Homo sapiens
  CDS (1)..(504)
atggttagtaatttcttccatgtcatacaagtattcgagaaatctgctaccttgattagtaagactgaacacattggttttgtcatttattcatggaggaagtccaccacccacttggggagcagaaggaaatttgccatctcaatttacttatcagaagtttctttgcagaaatatgattgtcccttcagtgggacatcatttgtggtcttctctctctttttgatctgtgcaatggctggagatgtagtctacgctgacatcaaaactgttcggacttccccgttagaactcgcgtttccacttcagagatctgtttctttcaacttttctactgtccataaatcatgtcctgccaaagactggaaggtgcataagggaaaatgttactggattgctgaaactaagaaatcttggaacaaaagtcaaaatgactgtgccataaacaattcatatctcatggtgattcaagacattactgctatggtgagatttaacatttagaggtgacagcatcccccacactggcagtgaattttttgtgctacaaacttggcaaaagtctgtgaaaagaagtttcaacttcatgtgttattaactatacaaatattagttgaatgaattgttgaattacaaaaaaaaaaaaaaa

SEQ ID NO: 114 - protein, 167 aa, Homo sapiens
MVSNFFHVIQVFEKSATLISKTEHIGFVIYSWRKSTTHLGSRRKFAISIYLSEVSLQKYDCPFSGTSFVVFSLFLICAMAGDVVYADIKTVRTSPLELAFPLQRSVSFNFSTVHKSCPAKDWKVHKGKCYWIAETKKSWNKSQNDCAINNSYLMVIQDITAMVRFNI

SEQ ID NO: 115 - DNA, 1937 bp, Homo sapiens
  CDS (141)..(1775)
caggcgtctaagtaacttcagcgcctgcgcagaggctccccagcgtcgccctaggctgggactctagtaggtcttcggctcagttttggctgcagcgcccgcgtagatcgcttcggccgggttctacgcccggctcaactatgagccggtgcgcccaggcggcggaagtggcggccacagtgccaggtgccggcgtcgggaacgtggggctgcggccgcccatggtgccccgtcaggcgtccttcttcccgccgccggtgccgaaccccttcgtgcagcagacgcagatcggctccgcgaggcgggtccagattgtccttcttgggattatcttgcttccaattcgtgtcttattggttgcgttaattttattacttgcatggccatttgctgcaatttcaacagtatgctgtcctgaaaagctgacccacccaataactggttggaggaggaaaattactcaaacagctttgaaatttctgggtcgtgctatgttcttttcaatgggatttatagttgctgtaaaaggaaagattgcaagtcctttggaagcaccagtttttgttgctgcccctcattcaacattctttgatggaattgcctgtgttgtagctgggttaccttctatggtatctcgaaatgagaatgcacaagtccctctgattggcagactgttacgggctgtgcaaccagttttggtgtcccgtgtagatccggattcccgaaaaaacacaataaatgaaataataaagcgaacaacatcaggaggagaatggccccagatactagttttcccagaaggtacttgtactaatcgttcctgtttgattacttttaaaccaggagccttcattccaggagttccagtgcagccagtcctcctcagatacccaaacaagctggatactgtgacctggacatggcaaggatatacattcattcagctttgtatgcttactttctgccagctcttcacaaaggtagaagttgagtttatgccagttcaagtaccaaatgatgaagaaaaaaatgatcctgtcctttttgccaataaagtccggaatttaatggcagaagctctgggaataccagtaacagatcatacctatgaagactgcagattgatgatttcagcaggacagctaacattgcctatggaagctgggctggtggaatttactaaaattagccgaaaattgaaattagattgggatggtgttcgtaagcatttggatgaatatgcatctattgcgagttcctcaaaaggaggaagaattggaattgaagaattcgccaagtatttaaagttgcctgtttcagatgtcttgagacaactttttgcactctttgacaggaaccatgatggcagcattgacttccgagagtatgtgattggcctggctgtcttgtgcaacccttccaacacagaggagatcatccaggtggcatttaagctgtttgacgttgatgaggatggctacataacggaggaagagttctccaccattctacaggcttcccttggagtgcctgaccttgatgtttctggtctcttcaaggaaatagcccaaggggactcaatttcctatgaggaatttaaaagttttgccttaaagcatccagaatatgctaagatatttacaacatacctagacctccagacgtgccatgtgttttcattaccaaaagaagtccagacaaccccctccaccgccagtaataaagtcagccctgaaaagcatgaagagagtacctcagacaaaaaagatgactgaaagcagtatttccaataaggaaaacacagtagcttttgcttgaaattgtaaaggcacttattgataatacttttaatgtgttggtaatgatgtttaaaattgaaagatttttaaaataaaaatgatagattttcttactaaaaaaaaaaaaaaaaaaaaaaa

SEQ ID NO: 116 - protein, 544 aa, Homo sapiens
MSRCAQAAEVAATVPGAGVGNVGLRPPMVPRQASFFPPPVPNPFVQQTQIGSARRVQIVLLGIILLPIRVLLVALILLLAWPFAAISTVCCPEKLTHPITGWRRKITQTALKFLGRAMFFSMGFIVAVKGKIASPLEAPVFVAAPHSTFFDGIACVVAGLPSMVSRNENAQVPLIGRLLRAVQPVLVSRVDPDSRKNTINEIIKRTTSGGEWPQILVFPEGTCTNRSCLITFKPGAFIPGVPVQPVLLRYPNKLDTVTWTWQGYTFIQLCMLTFCQLFTKVEVEFMPVQVPNDEEKNDPVLFANKVRNLMAEALGIPVTDHTYEDCRLMISAGQLTLPMEAGLVEFTKISRKLKLDWDGVRKHLDEYASIASSSKGGRIGIEEFAKYLKLPVSDVLRQLFALFDRNHDGSIDFREYVIGLAVLCNPSNTEEIIQVAFKLFDVDEDGYITEEEFSTILQASLGVPDLDVSGLFKEIAQGDSISYEEFKSFALKHPEYAKIFTTYLDLQTCHVFSLPKEVQTTPSTASNKVSPEKHEESTSDKKDD

SEQ ID NO: 117 - DNA, 3744 bp, Homo sapiens
  CDS (1047)..(3173)
tttcagccaaccagactggagcagctgcgagtgctacatcttggctgtctgaagcgattggctcctctctggggagtggagggtgttcagttattaatgaccgctgagcaggcagcaccatgtcagtgtgacaactgatcgggtgaacgatgcaccactaaccaccatggaaacaaggaaaaataaagccagctcacaggatctctcttcactggattgagagcctcagcctgccgactgagaaaaagagttccaggaaaaagaaggaatcccggctgcagcctcctgccttcctttatattttaaaatagagagataagattgcgtgcatgtgtgcatatctatagtatatattttgtacactttgttacacagacacacaaatgcacctatttataccgggcaagaacacaaccatgtgattatctcaaccaaggaactgaggaatccagcacgcaaggacatcggaggtgggctagcactgaaactgcttttcaaggaggtgaagcattccacagataatcagctactctattcagggaaggagtgtaaacatcaccactttttgcatgtttgcataaaaaaggcccactgaatcagttaaagacgaggaagaggaggagaaagagaaagaagaggaagatgttgggcaacatttatttaacatgctccacagcccggaccctggcatcatgctgctattcctgcaaatactgaagaagcatgggatttaaatattttacttctaaataaatgaattactcaatctcctatgaccatctatacatactccaccttcaaaaagtacatcaatattatatcattaaggaaatagtaaccttctcttctccaatatgcatgacatttttggacaatgcaattgtggcactggcacttatttcagtgaagaaaaactttgtggttctatggcattcatcatttgacaaatgcaagcatcttccttatcaatcagctcctattgaacttactagcactgactgtggaatccttaagggcccattacatttctgaagaagaaagctaagatgaaggacatgccactccgaattcatgtgctacttggcctagctatcactacactagtacaagctgtagataaaaaagtggattgtccacggttatgtacgtgtgaaatcaggccttggtttacacccagatccatttatatggaagcatctacagtggattgtaatgatttaggtcttttaactttcccagccagattgccagctaacacacagattcttctcctacagactaacaatattgcaaaaattgaatactccacagactttccagtaaaccttactggcctggatttatctcaaaacaatttatcttcagtcaccaatattaatgtaaaaaagatgcctcagctcctttctgtgtacctagaggaaaacaaacttactgaactgcctgaaaaatgtctgtccgaactgagcaacttacaagaactctatattaatcacaacttgctttctacaatttcacctggagcctttattggcctacataatcttcttcgacttcatctcaattcaaatagattgcagatgatcaacagtaagtggtttgatgctcttccaaatctagagattctgatgattggggaaaatccaattatcagaatcaaagacatgaactttaagcctcttatcaatcttcgcagcctggttatagctggtataaacctcacagaaataccagataacgccttggttggactggaaaacttagaaagcatctctttttacgataacaggcttattaaagtaccccatgttgctcttcaaaaagttgtaaatctcaaatttttggatctaaataaaaatcctattaatagaatacgaaggggtgattttagcaatatgctacacttaaaagagttggggataaataatatgcctgagctgatttccatcgatagtcttgctgtggataacctgccagatttaagaaaaatagaagctactaacaaccctagattgtcttacattcaccccaatgcatttttcagactccccaagctggaatcactcatgctgaacagcaatgctctcagtgccctgtaccatggtaccattgagtctctgccaaacctcaaggaaatcagcatacacagtaaccccatcaggtgtgactgtgtcatccgttggatgaacatgaacaaaaccaacattcgattcatggagccagattcactgttttgcgtggacccacctgaattccaaggtcagaatgttcggcaagtgcatttcagggacatgatggaaatttgtctccctcttatagctcctgagagctttccttctaatctaaatgtagaagctgggagctatgtttcctttcactgtagagctactgcagaaccacagcctgaaatctactggataacaccttctggtcaaaaactcttgcctaataccctgacagacaagttctatgtccattctgagggaacactagatataaatggcgtaactcccaaagaagggggtttatatacttgtatagcaactaacctagttggcgctgacttgaagtctgttatgatcaaagtggatggatcttttccacaagataacaatggctctttgaatattaaaataagagatattcaggccaattcagttttggtgtcctggaaagcaagttctaaaattctcaaatctagtgttaaatggacagcctttgtcaagactgaaaattctcatgctgcgcaaagtgctcgaataccatctgatgtcaaggtatataatcttactcatctgaatccatcaactgagtataaaatttgtattgatattcccaccatctatcagaaaaacagaaaaaaatgtgtaaatgtcaccaccaaaggtttgcaccctgatcaaaaagagtatgaaaagaataataccacaacacttatggcctgtcttggaggccttctggggattattggtgtgatatgtcttatcagctgcctctctccagaaatgaactgtgatggtggacacagctatgtgaggaattacttacagaaaccaacctttgcattaggtgagctttatcctcctctgataaatctctgggaagcaggaaaagaaaaaagtacatcactgaaagtaaaagcaactgttataggtttaccaacaaatatgtcctaaaaaccaccaaggaaacctactccaaaaatgaacaaaaaaaaaaaaagcgaaagactgcagttgtgctaaaaacaaaacaaaacaaacaaacaaacaaaaaagtaaaaaaagattactttcgagagagaagtttaagcttcaccaatgctgctcctgaccaatggaaatatgtacaacttcagcattttaagtaactggcttcaaggggtactgtggcaaccaaataaaataactccattttctaaaactttcatgtaacttttatgtctggactacagttcaagtggacaaaaacatttctgtattttttttaagtaaataagagtagttgaactgagcaatacctcctcctgtgttgtattacacatattagccacgagtttttgcagtgaccagataaacttgaattgacacgtggtgtaataaaatggacaaattctgtagagtagacacagtgagtatgtggacctcttttataaggaaaaatacattttggattaaaatcaattgcttctgtcttgttttgtttctaaataaagaataatttctgggaaaaaaaaaaaaaaaaaaa

SEQ ID NO: 118 - protein, 708 aa, Homo sapiens
MKDMPLRIHVLLGLAITTLVQAVDKKVDCPRLCTCEIRPWFTPRSIYMEASTVDCNDLGLLTFPARLPANTQILLLQTNNIAKIEYSTDFPVNLTGLDLSQNNLSSVTNINVKKMPQLLSVYLEENKLTELPEKCLSELSNLQELYINHNLLSTISPGAFIGLHNLLRLHLNSNRLQMINSKWFDALPNLEILMIGENPIIRIKDMNFKPLINLRSLVIAGINLTEIPDNALVGLENLESISFYDNRLIKVPHVALQKVVNLKFLDLNKNPINRIRRGDFSNMLHLKELGINNMPELISIDSLAVDNLPDLRKIEATNNPRLSYIHPNAFFRLPKLESLMLNSNALSALYHGTIESLPNLKEISIHSNPIRCDCVIRWMNMNKTNIRFMEPDSLFCVDPPEFQGQNVRQVHFRDMMEICLPLIAPESFPSNLNVEAGSYVSFHCRATAEPQPEIYWITPSGQKLLPNTLTDKFYVHSEGTLDINGVTPKEGGLYTCIATNLVGADLKSVMIKVDGSFPQDNNGSLNIKIRDIQANSVLVSWKASSKILKSSVKWTAFVKTENSHAAQSARIPSDVKVYNLTHLNPSTEYKICIDIPTIYQKNRKKCVNVTTKGLHPDQKEYEKNNTTTLMACLGGLLGIIGVICLISCLSPEMNCDGGHSYVRNYLQKPTFALGELYPPLINLWEAGKEKSTSLKVKATVIGLPTNMS

SEQ ID NO: 119 - DNA, 3637 bp, Homo sapiens
  CDS (940)..(3066)
tttcagccaaccagactggagcagctgcgagtgctacatcttggctgtctgaagcgattggctcctctctggggagtggagggtgttcagttattaatgaccgctgagcaggcagcaccatgtcagtgtgacaactgatcgggtgaacgatgcaccactaaccaccatggaaacaaggaaaaataaagccagctcacaggatctctcttcactggattgagagcctcagcctgccgactgagaaaaagagttccaggaaaaagaaggaatcccggctgcagcctcctgccttcctttatattttaaaatagagagataagattgcgtgcatgtgtgcatatctatagtatatattttgtacactttgttacacagacacacaaatgcacctatttataccgggcaagaacacaaccatgtgattatctcaaccaaggaactgaggaatccagcacgcaaggacatcggaggtgggctagcactgaaactgcttttcaagacgaggaagaggaggagaaagagaaagaagaggaagatgttgggcaacatttatttaacatgctccacagcccggaccctggcatcatgctgctattcctgcaaatactgaagaagcatgggatttaaatattttacttctaaataaatgaattactcaatctcctatgaccatctatacatactccaccttcaaaaagtacatcaatattatatcattaaggaaatagtaaccttctcttctccaatatgcatgacatttttggacaatgcaattgtggcactggcacttatttcagtgaagaaaaactttgtggttctatggcattcatcatttgacaaatgcaagcatcttccttatcaatcagctcctattgaacttactagcactgactgtggaatccttaagggcccattacatttctgaagaagaaagctaagatgaaggacatgccactccgaattcatgtgctacttggcctagctatcactacactagtacaagctgtagataaaaaagtggattgtccacggttatgtacgtgtgaaatcaggccttggtttacacccagatccatttatatggaagcatctacagtggattgtaatgatttaggtcttttaactttcccagccagattgccagctaacacacagattcttctcctacagactaacaatattgcaaaaattgaatactccacagactttccagtaaaccttactggcctggatttatctcaaaacaatttatcttcagtcaccaatattaatgtaaaaaagatgcctcagctcctttctgtgtacctagaggaaaacaaacttactgaactgcctgaaaaatgtctgtccgaactgagcaacttacaagaactctatattaatcacaacttgctttctacaatttcacctggagcctttattggcctacataatcttcttcgacttcatctcaattcaaatagattgcagatgatcaacagtaagtggtttgatgctcttccaaatctagagattctgatgattggggaaaatccaattatcagaatcaaagacatgaactttaagcctcttatcaatcttcgcagcctggttatagctggtataaacctcacagaaataccagataacgccttggttggactggaaaacttagaaagcatctctttttacgataacaggcttattaaagtaccccatgttgctcttcaaaaagttgtaaatctcaaatttttggatctaaataaaaatcctattaatagaatacgaaggggtgattttagcaatatgctacacttaaaagagttggggataaataatatgcctgagctgatttccatcgatagtcttgctgtggataacctgccagatttaagaaaaatagaagctactaacaaccctagattgtcttacattcaccccaatgcatttttcagactccccaagctggaatcactcatgctgaacagcaatgctctcagtgccctgtaccatggtaccattgagtctctgccaaacctcaaggaaatcagcatacacagtaaccccatcaggtgtgactgtgtcatccgttggatgaacatgaacaaaaccaacattcgattcatggagccagattcactgttttgcgtggacccacctgaattccaaggtcagaatgttcggcaagtgcatttcagggacatgatggaaatttgtctccctcttatagctcctgagagctttccttctaatctaaatgtagaagctgggagctatgtttcctttcactgtagagctactgcagaaccacagcctgaaatctactggataacaccttctggtcaaaaactcttgcctaataccctgacagacaagttctatgtccattctgagggaacactagatataaatggcgtaactcccaaagaagggggtttatatacttgtatagcaactaacctagttggcgctgacttgaagtctgttatgatcaaagtggatggatcttttccacaagataacaatggctctttgaatattaaaataagagatattcaggccaattcagttttggtgtcctggaaagcaagttctaaaattctcaaatctagtgttaaatggacagcctttgtcaagactgaaaattctcatgctgcgcaaagtgctcgaataccatctgatgtcaaggtatataatcttactcatctgaatccatcaactgagtataaaatttgtattgatattcccaccatctatcagaaaaacagaaaaaaatgtgtaaatgtcaccaccaaaggtttgcaccctgatcaaaaagagtatgaaaagaataataccacaacacttatggcctgtcttggaggccttctggggattattggtgtgatatgtcttatcagctgcctctctccagaaatgaactgtgatggtggacacagctatgtgaggaattacttacagaaaccaacctttgcattaggtgagctttatcctcctctgataaatctctgggaagcaggaaaagaaaaaagtacatcactgaaagtaaaagcaactgttataggtttaccaacaaatatgtcctaaaaaccaccaaggaaacctactccaaaaatgaacaaaaaaaaaaaaagcgaaagactgcagttgtgctaaaaacaaaacaaaacaaacaaacaaacaaaaaagtaaaaaaagattactttcgagagagaagtttaagcttcaccaatgctgctcctgaccaatggaaatatgtacaacttcagcattttaagtaactggcttcaaggggtactgtggcaaccaaataaaataactccattttctaaaactttcatgtaacttttatgtctggactacagttcaagtggacaaaaacatttctgtattttttttaagtaaataagagtagttgaactgagcaatacctcctcctgtgttgtattacacatattagccacgagtttttgcagtgaccagataaacttgaattgacacgtggtgtaataaaatggacaaattctgtagagtagacacagtgagtatgtggacctcttttataaggaaaaatacattttggattaaaatcaattgcttctgtcttgttttgtttctaaataaagaataatttctgggaaaaaaaaaaaaaaaaaaa

SEQ ID NO: 120 - protein, 708 aa, Homo sapiens; identical to SEQ ID NO: 118

SEQ ID NO: 121 - DNA, 3555 bp, Homo sapiens
  CDS (858)..(2984)
tttcagccaaccagactggagcagctgcgagtgctacatcttggctgtctgaagcgattggctcctctctggggagtggagggtgttcagttattaatgaccgctgagcaggcagcaccatgtcagtgtgacaactgatcgggtgaacgatgcaccactaaccaccatggaaacaaggaaaaataaagccagctcacaggatctctcttcactggattgagagcctcagcctgccgactgagaaaaagagttccaggaaaaagaaggaatcccggctgcagcctcctgccttcctttatattttaaaatagagagataagattgcgtgcatgtgtgcatatctatagtatatattttgtacactttgttacacagacacacaaatgcacctatttataccgggcaagaacacaaccatgtgattatctcaaccaaggaactgaggaatccagcacgcaaggacatcggaggtgggctagcactgaaactgcttttcaagcatcatgctgctattcctgcaaatactgaagaagcatgggatttaaatattttacttctaaataaatgaattactcaatctcctatgaccatctatacatactccaccttcaaaaagtacatcaatattatatcattaaggaaatagtaaccttctcttctccaatatgcatgacatttttggacaatgcaattgtggcactggcacttatttcagtgaagaaaaactttgtggttctatggcattcatcatttgacaaatgcaagcatcttccttatcaatcagctcctattgaacttactagcactgactgtggaatccttaagggcccattacatttctgaagaagaaagctaagatgaaggacatgccactccgaattcatgtgctacttggcctagctatcactacactagtacaagctgtagataaaaaagtggattgtccacggttatgtacgtgtgaaatcaggccttggtttacacccagatccatttatatggaagcatctacagtggattgtaatgatttaggtcttttaactttcccagccagattgccagctaacacacagattcttctcctacagactaacaatattgcaaaaattgaatactccacagactttccagtaaaccttactggcctggatttatctcaaaacaatttatcttcagtcaccaatattaatgtaaaaaagatgcctcagctcctttctgtgtacctagaggaaaacaaacttactgaactgcctgaaaaatgtctgtccgaactgagcaacttacaagaactctatattaatcacaacttgctttctacaatttcacctggagcctttattggcctacataatcttcttcgacttcatctcaattcaaatagattgcagatgatcaacagtaagtggtttgatgctcttccaaatctagagattctgatgattggggaaaatccaattatcagaatcaaagacatgaactttaagcctcttatcaatcttcgcagcctggttatagctggtataaacctcacagaaataccagataacgccttggttggactggaaaacttagaaagcatctctttttacgataacaggcttattaaagtaccccatgttgctcttcaaaaagttgtaaatctcaaatttttggatctaaataaaaatcctattaatagaatacgaaggggtgattttagcaatatgctacacttaaaagagttggggataaataatatgcctgagctgatttccatcgatagtcttgctgtggataacctgccagatttaagaaaaatagaagctactaacaaccctagattgtcttacattcaccccaatgcatttttcagactccccaagctggaatcactcatgctgaacagcaatgctctcagtgccctgtaccatggtaccattgagtctctgccaaacctcaaggaaatcagcatacacagtaaccccatcaggtgtgactgtgtcatccgttggatgaacatgaacaaaaccaacattcgattcatggagccagattcactgttttgcgtggacccacctgaattccaaggtcagaatgttcggcaagtgcatttcagggacatgatggaaatttgtctccctcttatagctcctgagagctttccttctaatctaaatgtagaagctgggagctatgtttcctttcactgtagagctactgcagaaccacagcctgaaatctactggataacaccttctggtcaaaaactcttgcctaataccctgacagacaagttctatgtccattctgagggaacactagatataaatggcgtaactcccaaagaagggggtttatatacttgtatagcaactaacctagttggcgctgacttgaagtctgttatgatcaaagtggatggatcttttccacaagataacaatggctctttgaatattaaaataagagatattcaggccaattcagttttggtgtcctggaaagcaagttctaaaattctcaaatctagtgttaaatggacagcctttgtcaagactgaaaattctcatgctgcgcaaagtgctcgaataccatctgatgtcaaggtatataatcttactcatctgaatccatcaactgagtataaaatttgtattgatattcccaccatctatcagaaaaacagaaaaaaatgtgtaaatgtcaccaccaaaggtttgcaccctgatcaaaaagagtatgaaaagaataataccacaacacttatggcctgtcttggaggccttctggggattattggtgtgatatgtcttatcagctgcctctctccagaaatgaactgtgatggtggacacagctatgtgaggaattacttacagaaaccaacctttgcattaggtgagctttatcctcctctgataaatctctgggaagcaggaaaagaaaaaagtacatcactgaaagtaaaagcaactgttataggtttaccaacaaatatgtcctaaaaaccaccaaggaaacctactccaaaaatgaacaaaaaaaaaaaaagcgaaagactgcagttgtgctaaaaacaaaacaaaacaaacaaacaaacaaaaaagtaaaaaaagattactttcgagagagaagtttaagcttcaccaatgctgctcctgaccaatggaaatatgtacaacttcagcattttaagtaactggcttcaaggggtactgtggcaaccaaataaaataactccattttctaaaactttcatgtaacttttatgtctggactacagttcaagtggacaaaaacatttctgtattttttttaagtaaataagagtagttgaactgagcaatacctcctcctgtgttgtattacacatattagccacgagtttttgcagtgaccagataaacttgaattgacacgtggtgtaataaaatggacaaattctgtagagtagacacagtgagtatgtggacctcttttataaggaaaaatacattttggattaaaatcaattgcttctgtcttgttttgtttctaaataaagaataatttctgggaaaaaaaaaaaaaaaaaaa

SEQ ID NO: 122 - protein, 708 aa, Homo sapiens; identical to SEQ ID NO: 118

SEQ ID NO: 123 - DNA, 2974 bp, Homo sapiens
  CDS (191)..(1060)
gcgcggcggaggctcccgtggcctcggacgctcctcctagctagcggccgccgcccgccgccgcctgcgcctccagctccttcgccccggcgggcccggccgccgcttccggcagctcacctgggaagcgctcacctgggacgcgctcacctgggacgcgctacctgcctccgggcgcctgggcttcaggatgaaggaccgtctggagcagctgaaggccaagcagctgacacaggatgatgatactgatgcggttgagattgctatcgacaacacggcttttatggacgagttcttttctgagattgaggaaactcggcttaacattgacaagatctcagaacatgtagaggaggctaagaaactctacagtatcattctctctgcaccgattccagagccaaaaaccaaggatgacctagagcagctcacgactgagattaagaaaagggccaacaacgtccggaacaaactgaagagcatggagaagcatattgaagaagatgaggtcaggtcatcggcagaccttcggattcggaaatcccagcactctgtcctttctcggaagtttgtggaggtgatgaccaaatacaatgaagctcaagtggacttccgagaacgcagcaaagggcgaatccagcggcagctcgaaattactggcaaaaagacaaccgatgaggagctggaggagatgttggagagtggcaacccggccatcttcacttctgggatcattgactcacagatttccaagcaagccctcagtgagattgagggacgacacaaggacattgtgaggctggagagcagcatcaaggagcttcacgacatgtttatggacatcgccatgctggtggagaatcagggtgagatgttagataacatagagttgaatgtcatgcacacagtggaccacgtggagaaggcacgagatgaaacgaaaaaagctgtgaaataccagagtcaggcccggaagaaattgataattatcattgtgctagtagttgtgttgctgggcattttagcattgattattggactttccgttgggctgaattaagagtggcctaagaggctgctgcactgaaataaactgatttcactccagactggtgtggccacccttgtcttcagatgagaatggagtctgaatggccttcctgagagcgagtgcgacccgttcctttgtttccttgcaaccacccttggacctgactcagctaacaatctagccctgggggaatgtgatctacctgatgcgaccctgagttctccccagagcctcctcctgccccaccagctctcaagtaccttttctcctggactgtgtggacccacccagctttcttcctccctgttgtgtgtcagattatgccttgcacttgggaaagctcttgtgagactctcccaaggtgctgtatttttctacctcatggagtattctcccagaaactgcaatgtatttttttaggggagtatctttaacaaagcagaatgattcttctaagtttggcaacaagaaggcttggatctgagtcttctacctggcaggatgccaatcctgtttgttgtccgtatgtcctgaaaacatgagggactggcagatgtcattttggtctaaagagctgacttgtttgaaattcagccttaaattaagctcttagttgttcagcttggggggcaactttgatttttctctgtgttgtagtctctcatatttactcaaggagggaccaggatgatacagtcatctgaggttatgctttgcaaaaggctgacggtatggaatatgtttccatgtctgagtcttagaaactggctgctcattgttagaaagtgatgctttgtgagactattgtcttggggccaaaaataatcagggattttaaattgggcaagggacaaggtgctagaatcctaagctctggaaatatttcatgacactggtgtattcactcatgtgttccagatgtattctaattgtgtatgaaatgtatgtacacataagtgtgtgtgtctcaggaagtaggaaataaaaatggaagctattatgacctcaaaaaaaaaaagccaactttgagctaggataaaaattgggtaaaggacatttgcttacctgcaaatgaatcactgtggaaatgtgatcttcccatatcatcaagaaacttgttttctggatgaatactgggagaataaaatgagaactctggagtgagctaaattgatcccaattaagtttttctgcttagcagacagaaggtataattttttgacaccctttcccacctggtgcctatgctaggcttgtcctgagaacatccctcagtaacttgatattcacatgacctacaggatgtcccatctgcagggctgagtcagttggggaacaccagaggctacacagtagctcttcctgctactcggttaatgagcttggcaggttctttgtctcactgaattcttatcatggaaacagcagcagcagccgctaggaaatcttcaagtgtagtgtctgtgctaacccagtggtaaatcccttagatcccctgctggtctctggcagtctccttgattttgggtaccatgtatattttccgctttgactttaacgctttctaggatagggtaagcacccttaattcaggcactgtccattagcttcctttgcaaaggctacttatggccggtcacaatccagcactcagacagagccaaggcaatatcctcttgcccatggctatgatgtcagacagtggatgggctccagcaacaagagacaaaataactaaaggcctttgctctcctctgacattgaggcctggggcttacagtttggaatacaacatgtgaaggtttttgttgttgtttgtattttttagatgtaaacttgattattttattgctaatttaaaaataaaaatgactttgtattgattgtgaaaaaaaaaaaaaaaaaaaaaaaaaaaaaaaaaaa

SEQ ID NO: 124 - protein, 289 aa, Homo sapiens
MKDRLEQLKAKQLTQDDDTDAVEIAIDNTAFMDEFFSEIEETRLNIDKISEHVEEAKKLYSIILSAPIPEPKTKDDLEQLTTEIKKRANNVRNKLKSMEKHIEEDEVRSSADLRIRKSQHSVLSRKFVEVMTKYNEAQVDFRERSKGRIQRQLEITGKKTTDEELEEMLESGNPAIFTSGIIDSQISKQALSEIEGRHKDIVRLESSIKELHDMFMDIAMLVENQGEMLDNIELNVMHTVDHVEKARDETKKAVKYQSQARKKLIIIIVLVVVLLGILALIIGLSVGLN

SEQ ID NO: 125 - DNA, 9156 bp, Homo sapiens
  CDS (69)..(4214)
ccgctgcccgctgcccgctgccctcgccccgcgcgccgggcatgtgagcgcgggcgggcgccgtcaccatggcctcgccgcgcgcctcgcggtggccgccgccgctcctgctgctgttgctgccgctgctgctgctgccgccggcggcccccgggacgcgggacccgccgccttccccggctcgccgcgcgctgagcctggcgcccctcgcgggagcggggctggagctgcagctggagcgccgcccggagcgcgagccgccgcccacgccgccccgggagcgccgcgggcccgcgacccccggccccagctacagggcccctgagccaggcgccgcgacacagcggggaccctccggccgggcccccagaggcgggagcgcggatgctgcctggaaacattggccagaaagtaacactgaggcccatgtagaaaacatcaccttctatcagaatcaagaggacttttcaacagtgtcctccaaagagggcgtgatggttcagacctctgggaagagccatgctgcttcggatgctccagaaaacctcactctactcgctgaaacagcagatgctagaggaaggagcggctcttcaagtagaacaaacttcaccattttgcctgttgggtactcactggagatagcaacagctctgacttcccagagtggcaacttagcctcagaaagtcttcacctgccatccagcagttcagagttcgatgaaagaattgccgcttttcaaacaaagagtggaacagcctcggagatgggaacagagagggcgatggggctgtcagaagaatggactgtgcacagccaagaggccaccacttcggcttggagcccgtcctttcttcctgctttggagatgggagagctgaccacgccttctaggaagagaaattcctcaggaccagatctctcctggctgcatttctacaggacagcagcttcctctcctctcttagacctttcctcatcttctgaaagtacagagaagcttaacaactccactggcctccagagctcctcagtcagtcaaacaaagacaatgcatgttgccaccgtgttcactgatggtggcccgagaacgctgcgatctttgacggtcagtctgggacctgtgagcaagacagaaggcttccccaaggactccagaattgccacgacttcatcctcagtccttctttcaccctctgcagtggaatcgagaagaaacagtagagtaactgggaatccaggggatgaggaattcattgaaccatccacagaaaatgaatttggacttacgtctttgcgttggcaaaatgattccccaacctttggagaacatcagcttgccagcagctctgaggtgcaaaatggaagtcccatgtctcagactgagactgtgtctaggtcagtcgcacccatgagaggtggagagatcactgcacactggctcttgaccaacagcacaacatctgcagatgtgacaggaagctctgcttcatatcctgaaggtgtgaatgcttcagtgttgacccagttctcagactctactgtacagtctggaggaagtcacacagcattgggagataggagttattcagagtcttcatctacatcttcctcggaaagcttgaattcatcagcaccacgtggagaacgttcgatcgctgggattagctacggtcaagtgcgtggcacagctattgaacaaaggacttccagcgaccacacagaccacacctacctgtcatctactttcaccaaaggagaacgggcgttactgtccattacagataacagttcatcctcagacattgtggagagctcaacttcttatattaaaatctcaaactcttcacattcagagtattcctccttttttcatgctcagactgagagaagtaacatctcatcctatgacggggaatatgctcagccttctactgagtcgccagttctgcatacatccaaccttccgtcctacacacccaccattaatatgccgaacacttcggttgttctggacactgatgctgagtttgttagtgactcctcctcctcctcttcctcctcctcctcttcttcttcttcagggcctcctttgcctctgccctctgtgtcacaatcccaccatttattttcatcaattttaccatcaaccagggcctctgtgcatctactaaagtctacctctgatgcatccacaccatggtcttcctcaccatcacctttaccagtatccttaacgacatctacatctgccccactttctgtctcacaaacaaccttgccacagtcatcttctacccctgtcctgcccagggcaagggagactcctgtgacttcatttcagacatcaacaatgacatcattcatgacaatgctccatagtagtcaaactgcagaccttaagagccagagcaccccacaccaagagaaagtcattacagaatcaaagtcaccaagcctggtgtctctgcccacagagtccaccaaagctgtaacaacaaactctcctttgcctccatccttaacagagtcctccacagagcaaacccttccagccacaagcaccaacttagcacaaatgtctccaactttcacaactaccattctgaagacctctcagcctcttatgaccactcctggcaccctgtcaagcacagcatctctggtcactggccctatagccgtacagactacagctggaaaacagctctcgctgacccatcctgaaatactagttcctcaaatctcaacagaaggtggcatcagcacagaaaggaaccgagtgattgtggatgctaccactggattgatccctttgaccagtgtacccacatcagcaaaagaaatgaccacaaagcttggcgttacagcagagtacagcccagcttcacgttccctcggaacatctccttctccccaaaccacagttgtttccacggctgaagacttggctcccaaatctgccacctttgctgttcagagcagcacacagtcaccaacaacagtgtcctcttcagcctcagtcaacagctgtgctgtgaacccttgtcttcacaatggcgaatgcgtcgcagacaacaccagccgtggctaccactgcaggtgcccgccttcctggcaaggggatgattgcagtgtggatgtgaatgagtgcctgtcgaacccctgcccatccacagccatgtgcaacaatactcagggatcctttatctgcaaatgcccggttgggtaccagttggaaaaagggatatgcaatttggttagaaccttcgtgacagagtttaaattaaagagaacttttcttaatacaactgtggaaaaacattcagacctacaagaagttgaaaatgagatcaccaaaacgttaaatatgtgtttttcagcgttacctagttacatccgatctacagttcacgcctctagggagtccaacgcggtggtgatctcactgcaaacaaccttttccctggcctccaatgtgacgctatttgacctggctgataggatgcagaaatgtgtcaactcctgcaagtcctctgctgaggtctgccagctcttgggatctcagaggcggatctttagagcgggcagcttgtgcaagcggaagagtcccgaatgtgacaaagacacctccatctgcactgacctggacggcgttgccctgtgccagtgcaagtcgggatactttcagttcaacaagatggaccactcctgccgagcatgtgaagatggatataggcttgaaaatgaaacctgcatgagttgcccatttggccttggtggtctcaactgtggaaacccctatcagcttatcactgtggtgatcgcagccgcgggaggtgggctcctgctcatcctaggcatcgcactgattgttacctgttgcagaaagaataaaaatgacataagcaaactcatcttcaaaagtggagatttccaaatgtccccgtatgctgaataccccaaaaatcctcgctcacaagaatggggccgagaagctattgaaatgcatgagaatggaagtaccaaaaacctcctccagatgacggatgtgtactactcgcctacaagtgtaaggaatccagaacttgaacgaaacggactctacccggcctacactggactgccaggatcacggcattcttgcattttccccggacagtataacccgtctttcatcagtgatgaaagcagaagaagagactacttttaagtccaggagagagagggactcattgctctgagccagtcacctgggacctctgctcagaggaccgcaccaggaggctgcgcccaggatttgtcgggagccacgctgagtggcaagcaggaagagggacaggcatgcggggcgtgaccacagtggaggagacaggtggatgtggaaccacaggctgctcattcagcacctttgttgttactgtgaacgtgaatgtgggccagtatcaagagagtctctctgagtgactgcaccatggcactggcaccagggcgactattagccagggcagaccactagacttcagtgcagggacctggttttcccttcgtttgcactttagtaaattgggtgggaggtttccttttggatctgttttgagactgttccagaaagaaggcttcctttcccgagacacttccataggcagcaatttggtgattcatttgcagcaaaatactggcttgttaattattttcctgcccagcgcctgcgtgctaaacaacagatgaggatgagcgtaccactgaagtctgaagatgtcgccattgaacggacagtgttttcatatgtttctaggttgtcttatgctacagtttccaagccagcccccacagtgaggaaatgtgtgaggcaccgcacacaactgcaatgtgttttttaagtcaaggtgacacatgtatttaagattttttttttaaatctctttgcagttaaatctcactttttcaaacaagcctggatcagggcaaaacaacttatatttggttttagctggaggctcagcaggcagattgcaggcaggggggcacttttcatccatgagggcccagcctggggcctgggactcgatcaccattgtggaggccagaggcagctgcgtatggaggagaaatgtcaaactgaacgcaggtttcaccactctaggaaagcagcttgttgagcccctgcagctggatgtggttagagggatgggctgaataggcaggttagatttcctgcatcaacagtgctttgggaagctgtgtggattcctgaggaagaacagggagccgagatggagccacacatgagtttgctcaccggctactgcagcactttgtacccagaatctcatgtccacaaaccccatgtaaactttcaaccactcaaagctgtttattcggctgaagaaataacttttttttctcacccagtcatttgtacctcttcatatggctatgtcgcaccctccagaaacgtggttatacttccagtcagtgtgggagaactgaagacttccggttggtcgaggaactgagggttgaccttcgggaaggaagttccactcatcttatttattatgcctgtgatgtgggtcctgccagggagacatccagtactcggtgtctttaattgccacctggggaactgtgtttattggccttctttggggcatcctggttttggatgaagtgaggggaatacagaggtaaaagaattgtctccaccctgaagcggggagtcccgcttcacatttctggaaatggtgcagccactggggacagttctgccccgggcatggttgtttcttcaaggtcctctaaatataatccctattcttacataatccttggccctgatggttttaagcaagaactcctgtgtcccatggtctccaccactcaccatcaccctgctgtagcaagagtcctagtcaggggaggtgcattttagtagttacattgcacttatccatgagataaataaaaggagaactgtttttatcagtggaggctaacctaaaatttcaaagtgtcgcctttttgaaatcttgggcctctctctctgtagaaccaatggccctttgtggctcacggcctcgcacctaactggagagttctgagctcctgcagctcacctgagcccacagactaggcttcttggctccttccgcagcatgcctgctcacccccagaacccgcagctgtgggaagagccatgtagggaggctattcccaggcatacacttccactgccttcagctgacgtcacagctgacaaatcatctcctctatcggagccagaagacttcagctccacaaaatgaagtgttctgtcctgaaaacattcttgggaagaatcccaacatcgagaaaacggtgtcctgtgagttccaacaatgcttcttgttcatgggtttcttccgtatggagtggattaagagtgttttattttgttgttctaactgagaaaaaaaggaggcacccacaaggttgaggtcacacagtctccacagtttccaggaggcgtttgggggtggggaaggcacctccagagcatgaggctctaaggggacatgagtaaagcatgtctgtgacccagtgaggaagggagaggccagctgcactcctgcacggggttcctagctgcagaagggtcccgcctaggccgaggggaaacacctgatagcagaagaggcctggatgcacacctggcacgccgaggctctccgcccagacacagtgctccatgtcagcccctgcacctggggtgtgtgattcacgtgcacagatgccacaatcctgcaccaatatcccacagatgggggaaggtgagaggaaggggcaagtgatgtgtaactgctcaagagatgcttaaacctccatagagaggagccgggcgcaggggcatctgtgtgtcccgtcacacactgcagcagggaagggtggctggctggctccctggcatcagtggtttggtttaagctccagagggtcttattgccattgtcttttcctctgccccttgagccagcctaaggccctggagtctgtttctttaggcggatgaactgacatgctcctaccatgaccaggctctgggcaaggctcctcacagtatccttgagaggtgggcatggaagtgcccatttctcaggtacagaaaccttcagagaggataaatagcttgccctgtagaagcaggactgaaacccttgtctgcctgactcccccagctactctgcccactgtagccccctgccttactgtcctggcacacccctcaccatcctgtataccttaaatatcaaagagggcaagagagaaagggctttaaagataagttatttttttaaggaaccttaatattatttttaagaagtaaccaaattagtgacgtgaaatgcaaaaaaaaaaaaaaaaaaatgctgactacccttttgaaaatgtgctttcagattgttttttatatgtaattcttagacacttgtcattaagaaaatagtggctggcttgtgctcagcaagaagcacactggcacgtggctttggtataggaagtggaaggcaaggacctgggtttctgacaagtgcagtcagacatacacatccatctgagagctgcttgccttgttcccgtggtaaggccatggctcccacatactggaagcatatttttgtgaactgttttcagaattgggaacatattcagtggaatgtcttaaacgctgacacatcttcctcctttgaggggaagtatattttcagaagcagctaagacatttagagccaaaattgctgataggtggttcagtcaagttggctgatggcatctgaggtcaaaaactaagatgtgacgattgagttcttaaagaggtaactcttaaagtgggcccaagggagaaggcagcatctttggactcctaggctggatggctacccaagaatatgccattgaaggatgacacctattcagatgtgaaagttcccagagcaggcacctttgggtcacccaccacgtgtggctttttggtgcctgcatgaaactgtgttgccccctggtgagatgcccgggtgtcctgtaagccgatttaactctgcctgaggaagaggagctgtccactccagttgcccttggctaagtttagcctaacacacagggttttgacccatagttctaaaatacacaaattttgagactacagcacttctttggaaagaggaagaatgcaaagttcagtatttcaatactttgtattttacttgaaattacccttagtagcatcttttttttcctgtctgaaagcttttgtgtggatgagaagggacatttcatttcctcccttaacaaagtgtcattctgaggttctcatgtgtgtttttggaaatagagatactggttttgtagagtttgcctttgggtatgttttctttttttcttaaatctccaaggaagagaactgactaaaatagtaggaacatgaaagtattaaatgccaattaatttgttgtagtaaagtatcttcattagcgttatactccatcatatctggtgtaaactgctcacagaaaaccctatgaaaccaaagggggaccattcaggtctaaaaagcgacaggtccgagactgggtctgtcacctgggcattttcaaagaggacattttgaagaatttgcatattcagatttttaaaatgcacttaacatacttcattacagatttcttgggtagggaggatgggataggccagggatgggatggagtcagttctgcctgggaaactaatccgaatcatttacctttctgtattaaccttggcctgtcctaaaaagagaacgactgtttcatcatgagttgctctgagttttgttaatgtttgtgttggtggattgacggttaaatgaagcatttagctggaatatgaactttgggagttttcatgttgtcctggatttctctttgtaaacctttaaaccttagcccctggttgattgtgttaaacccattatgagaatgttatttaaagttgtattataattgcaacctccactaattattcagtactgtagcagcaaagtattatttgtaagaatttggttatttttatacttatatccactctaagtctggcgttctagtcagtaaaatgatgcaataaaattaatatcattttca

SEQ ID NO: 126 - protein, 1381 aa, Homo sapiens
MASPRASRWPPPLLLLLLPLLLLPPAAPGTRDPPPSPARRALSLAPLAGAGLELQLERRPEREPPPTPPRERRGPATPGPSYRAPEPGAATQRGPSGRAPRGGSADAAWKHWPESNTEAHVENITFYQNQEDFSTVSSKEGVMVQTSGKSHAASDAPENLTLLAETADARGRSGSSSRTNFTILPVGYSLEIATALTSQSGNLASESLHLPSSSSEFDERIAAFQTKSGTASEMGTERAMGLSEEWTVHSQEATTSAWSPSFLPALEMGELTTPSRKRNSSGPDLSWLHFYRTAASSPLLDLSSSSESTEKLNNSTGLQSSSVSQTKTMHVATVFTDGGPRTLRSLTVSLGPVSKTEGFPKDSRIATTSSSVLLSPSAVESRRNSRVTGNPGDEEFIEPSTENEFGLTSLRWQNDSPTFGEHQLASSSEVQNGSPMSQTETVSRSVAPMRGGEITAHWLLTNSTTSADVTGSSASYPEGVNASVLTQFSDSTVQSGGSHTALGDRSYSESSSTSSSESLNSSAPRGERSIAGISYGQVRGTAIEQRTSSDHTDHTYLSSTFTKGERALLSITDNSSSSDIVESSTSYIKISNSSHSEYSSFFHAQTERSNISSYDGEYAQPSTESPVLHTSNLPSYTPTINMPNTSVVLDTDAEFVSDSSSSSSSSSSSSSSGPPLPLPSVSQSHHLFSSILPSTRASVHLLKSTSDASTPWSSSPSPLPVSLTTSTSAPLSVSQTTLPQSSSTPVLPRARETPVTSFQTSTMTSFMTMLHSSQTADLKSQSTPHQEKVITESKSPSLVSLPTESTKAVTTNSPLPPSLTESSTEQTLPATSTNLAQMSPTFTTTILKTSQPLMTTPGTLSSTASLVTGPIAVQTTAGKQLSLTHPEILVPQISTEGGISTERNRVIVDATTGLIPLTSVPTSAKEMTTKLGVTAEYSPASRSLGTSPSPQTTVVSTAEDLAPKSATFAVQSSTQSPTTVSSSASVNSCAVNPCLHNGECVADNTSRGYHCRCPPSWQGDDCSVDVNECLSNPCPSTAMCNNTQGSFICKCPVGYQLEKGICNLVRTFVTEFKLKRTFLNTTVEKHSDLQEVENEITKTLNMCFSALPSYIRSTVHASRESNAVVISLQTTFSLASNVTLFDLADRMQKCVNSCKSSAEVCQLLGSQRRIFRAGSLCKRKSPECDKDTSICTDLDGVALCQCKSGYFQFNKMDHSCRACEDGYRLENETCMSCPFGLGGLNCGNPYQLITVVIAAAGGGLLLILGIALIVTCCRKNKNDISKLIFKSGDFQMSPYAEYPKNPRSQEWGREAIEMHENGSTKNLLQMTDVYYSPTSVRNPELERNGLYPAYTGLPGSRHSCIFPGQYNPSFISDESRRRDYF

SEQ ID NO: 127 - DNA, 5042 bp, Homo sapiens
  CDS (2379)..(3854)
gcaagcatttaggaatagcatttgccaactcccaagacttggctgtccctctcgctctggccttacttacctaactgacctcctgtagtactgagttgtgtgctggccaagttcctattcctggactgctttctttcccttgaccttccttgaaatactgctaacctgacttttgactgtgatctatgtgctatctcctgtgtgaagcctaatgaaaggtccttctctaatggaaactttcattctaggagttacctcattctgttttatgtggatctgttagctccttcattaggtttcaagctgtttgaaacagtgattgaatttgctcacctttgctttcctctcagggtctacattgggaccctgagtgataatagagccttctgtagtattgaattgctttaaacagaattaaaggacattggcaccaaatgtgattttgccaatccttgggagtcttggtgcctctgtctgggcttgaccagggtagaatggctgaagaaaatgtgattcctccacccattaaattctttatttctcaactactctggaagtttttgcctctttttgtttctatccattttcatacttttaagatacccttttttactttaagataccttttttcttcctaacgtttctttacatgctcacatgcaagcccagtcatccatctctctttttcacctttctgtcctcatatatttttcttaaaatatcttttctcatctaatctcctttcctctatcaatcagcctcctaagcgaaaatggtagtgctaatgttttaaaaagtgggggaggactagaaatctgtatggaatgtaattcacttttattgcttttaaattaaatgaaacgtttttgcccttgtttccattctactcagaaggatttcagactaaatccttaagcctgccatatggaaataactgggctagagggctgctatctaatctaagcatttaattcaaacatttgaaatggtttttgcttcaagaaaacataggttgacactaagctttattttagcaaaggtttgggaaaggttctaatctgcagtatgtacactttgataaatttcatagactagagcaacagattacaatttagtttgttcttccaacataaaactattttaatcctagttataatttcactgaaggctggatttactcactggcttgttaaaactgtagataacaaccacaagcctgttatttaaacacaattcagaaatcataaatagaaattcaaaaggagagctcaatgctgcaagatgagatttgatgccctgaagaaactctctctgaaatttgccaaagaccttgtggaacttaaaatatcttcttgtttcctaccagctagatatggcagcttgagaactatttattatgaatcaagatagatattttaccaactcagaaaatgttgctttttgtttggatattaatcttgtttgttcatatttttaactaggaaagttagtacagtaatatggtggtcatccaacagaccacaagaagagaatttgtccctcattcagcattttagcaaatatttcttgaacactagccatgtgcaaggtattacagtgagtgtttctgctaataaaaatatgaattaaatttgatgtttgatcataagtagaagaactgtgatactataatattgtaagtgccatagaaaacttgctattataaaatgctgtaaggagttaatgcttgcatagggtgcagtgggtcagctagagaaggctttataaagaaagtggaatatgagctttgatgcctagccagatgtgggtatgtgaagaacagggcagggcagtggggagtgggtggattctggacagctgaaacattgttaacaaaatctcagaaatggtacaaaatggaatatgaatgagaaatacagaacatttgttaggttttatttttatgcaaattaaagagaagagttagagacaaagttaaagtcaatgggtctagaatttcagctaaaactttggtaggtagtggagaatattttatcattattctgctctttaaacaacttcagagatgattgattaatcttgattgtaaaggaagagaaattctttggaagaccagttagggggttatcatatggtctagtaaaagttaataagatctgcacaaggctgggaagagtaggattagaacagaggggtggaattaaaggacatcgtatattggaaatttctaggatttagaacctgattggaagaggaagaagaaagggaggagttaaaaataactgtaaagagccaaatctgagaactgaccctgctaaaaaagtcagacaagtcaagtggtgcagctggtgtgtgctagaagagtaaaaggccaagctatgatagcaactggtggagtgataactggcctggccgccttgaaaaggcaagactctgccagatcacagcagcatgtcaacctcagcccgtctcctgctacccaagagaagaagcccatcaggcgccggccccgggcagatgttgtggttgttcgtggcaaaatccggctttattccccatctggtttttttcttattttaggagtgctcatctccattataggaattgctatggccgttcttggatattggccccaaaaagaacattttattgatgctgaaacaacactgtcaacaaatgaaactcaggtcattcggaatgaaggcggtgtggtggttcgcttctttgagcagcatttgcattctgataagatgaaaatgcttggcccattcaccatggggattggcattttcattttcatttgtgctaatgccattcttcatgaaaaccgtgacaaagagaccaaaatcatacacatgagggatatctattccacagtcattgacattcacacgctaagaatcaaggagcaaaggcaaatgaacggcatgtacactggtttgatgggagaaacagaagtaaaacagaatgggagctcctgtgcctcgagattggcagcaaatacgatcgcctctttctcgggttttcggagcagttttcgaatggacagctccgtggaggaggatgaacttatgttaaatgaaggtaagagttctgggcatcttatgccccctttgctctctgacagctctgtgtctgtctttggcctctatccacctccttccaagacaactgatgataagaccagcggctctaagaaatgtgaaaccaagtcaattgtgtcatcgtccatcagtgcttttacattgcctgtgatcaaacttaataactgtgttattgatgagcccagtatagataacatcactgaagatgctgacaacctcaaaagtaggtcaaggaatttgtcaatggattcccttgtggttcctttgcccaacaccagtgaatccttccagcccgtcagcacagtgctaccaaggaataattccattggggagtcgttgtcgagtcagtacaagtcatctatggctctcggacctggggctggacagctcttgtctcctggggctgccagaagacagtttgggtccaatacatccttgcatttgctctcgtcacactcaaagtccttggacttagaccggggtccctccactctaactgttcaggcagaacaacggaaacatccaagttggcctaggttggatcggaacaacagcaagggatatatgaaactagagaacaaagaagacccgatggataggttgcttgtgccccaagttgccatcaaaaaggactttaccaataaggagaagcttcttatgatttcaagatctcacaataatttgagttttgaacatgatgagtttttgagtaacaacctaaagaggggaacttctgaaacaaggttttaatgttaaaagaatatatcattttacaagggtatatattttaaaacgattttcactggtgtttccttcttaaagtattggctgtaagcctttttaatcaaatggtttgtagtgtattagaattggctgcttagttctgtaatgaagatggttgtatgtttgggttacttgtgactgcagtactctatgttaccacacatgattttatttttctcttcctttgaaagcatgatctcttttattaatatgaatgcaaaatgcttgcatccaaattaaagcttattttctttacttttaagttctttgattgccctattcataaaatgaaatgtccagtatggaaaacatagggtaccaaagtgtggaccaggagtacaaattcagtcccaatactcaatacgtattatagatgactatgagtgcaaaccttaggatgtgattttctgaataattgttctttgtaggatttggttacattatttaaaatgaaaaagatctagttttagtgtgagctcagtaatgttaattggttaagttcattgtgaatcttgagttttagataagtagttatttttttcaatatcacttctgtttttagtgatattatatcaagaaacaacgtattcaagagccatggctgacagtgccagatatacttagggataaacatcaaaatgcaattatagttgctataacgttagatactcggaatcaaaatttatttgcaagctgacttgataaactaaatgaaccaataaaatttgtagaaatgctatcctgaaataattatatacatgaagacaatgttgactaatgaattaagatacattatatactagttaatgctaactagtctcagtacctgtttttagccatctgttactgtccaatagcacctcattcccacattctattttcccccggtattctttagatcctagtatttggaaaacaatcggctaaccttgacatttctttttaccttcatatgccactatctcggtagttcaaaaaaatttagttcttgataaattgccttgaagtttaccttgtgctggagagccttatgataactccaaagactttcttacggtataatacatgttgtttaggattgtgtttcttagtcactgaagataataaatattaaaatggatgttttcatcagaaaaaaaaaaaaaaaaaaaaaaa

SEQ ID NO: 128 - protein, 491 aa, Homo sapiens
MIATGGVITGLAALKRQDSARSQQHVNLSPSPATQEKKPIRRRPRADVVVVRGKIRLYSPSGFFLILGVLISIIGIAMAVLGYWPQKEHFIDAETTLSTNETQVIRNEGGVVVRFFEQHLHSDKMKMLGPFTMGIGIFIFICANAILHENRDKETKIIHMRDIYSTVIDIHTLRIKEQRQMNGMYTGLMGETEVKQNGSSCASRLAANTIASFSGFRSSFRMDSSVEEDELMLNEGKSSGHLMPPLLSDSSVSVFGLYPPPSKTTDDKTSGSKKCETKSIVSSSISAFTLPVIKLNNCVIDEPSIDNITEDADNLKSRSRNLSMDSLVVPLPNTSESFQPVSTVLPRNNSIGESLSSQYKSSMALGPGAGQLLSPGAARRQFGSNTSLHLLSSHSKSLDLDRGPSTLTVQAEQRKHPSWPRLDRNNSKGYMKLENKEDPMDRLLVPQVAIKKDFTNKEKLLMISRSHNNLSFEHDEFLSNNLKRGTSETRF

SEQ ID NO: 129 - DNA, 1258 bp, Homo sapiens
  CDS (37)..(1038)
caccattaggcaaagatagtttctctagagagaatcatgcctgctaattacacgtgtaccaggccagatggagacaatacagattttcgatactttatttatgcagtgacatacactgtcattcttgtgccaggtctcatagggaatatattagccctgtgggtattctatggttatatgaaagaaacaaaacgagctgtgatatttatgataaacttagccattgctgacttactacaagttctttccttgccactgaggatcttctactacttgaatcatgactggccatttgggcctggtctctgcatgttctgtttctacctgaagtatgtcaacatgtatgcaagcatctacttcttggtctgcatcagtgtgcgacgattttggtttctcatgtacccctttcgcttccatgactgcaaacagaaatatgacctgtacatcagcattgctggctggctgatcatctgccttgcctgtgtactctttccactcctcagaaccagtgatgatacctctggcaataggaccaaatgctttgtggatcttcctaccaggaatgtcaacctggcccagtccgttgttatgatgaccattggcgagttgattgggtttgtaactccgcttctgattgtcctatattgtacctggaagacggttttatcactgcaagataaatatcccatggcccaagatcttggagagaaacagaaagccttgaagatgattctaacctgtgcaggggtattcctaatttgctttgcaccttatcatttcagttttcctttagatttcctggtgaagtccaatgaaattaaaagctgcctagccagaagggtgattctaatatttcattctgtggcattgtgtcttgctagtctgaattcatgtcttgacccagtcatatactacttttccactaatgagttccgaagacggctttcaagacaagatttgcatgacagcatccaactccatgcaaaatcctttgtgagtaaccatacagcttccaccatgacacctgaattatgctaaaacaaaaaaccaaactgaatgtgacctgaaatgcaagtacatcagaacatatctgcaatacccaagccacagggaagaacttgcaaaacaacacagcttttcagttctgctctatcttactgctatggggaattcacttcttcaaagcaggacctatttggagcattacgatccacgattattgatgttgacatgtccatgtagtaatttttcttcaagt

SEQ ID NO: 130 - protein, 333 aa, Homo sapiens
MPANYTCTRPDGDNTDFRYFIYAVTYTVILVPGLIGNILALWVFYGYMKETKRAVIFMINLAIADLLQVLSLPLRIFYYLNHDWPFGPGLCMFCFYLKYVNMYASIYFLVCISVRRFWFLMYPFRFHDCKQKYDLYISIAGWLIICLACVLFPLLRTSDDTSGNRTKCFVDLPTRNVNLAQSVVMMTIGELIGFVTPLLIVLYCTWKTVLSLQDKYPMAQDLGEKQKALKMILTCAGVFLICFAPYHFSFPLDFLVKSNEIKSCLARRVILIFHSVALCLASLNSCLDPVIYYFSTNEFRRRLSRQDLHDSIQLHAKSFVSNHTASTMTPELC

SEQ ID NO: 131 - DNA, 1993 bp, Homo sapiens
  CDS (144)..(974)
actcatttataccaggaaacagacaagagaacaagaggctgccgaagacaaaacttctctgcaagcacctgtgcacagcaatgtgcgtgggcatctgtgagaagaagagaatctgtgaagtttgagcaagcggccttcccaagatgtaccgaatatctcaactgatgtcaacaccagtagcaagttcttccaggttggaaagagaatatgctggagagctgtctcccacgtgcattttcccaagtttcacctgtgattccctggatggttaccattcttttgaatgcggctccatagatcccctgacaggctcccactatacctgtcgccgaagtcccagactcctcaccaatggctactatatttggactgaagacagcttcctgtgcgacaaagatggcaacataactctgaacccatcccagaccagcgttatgtataaggagaacttagttagtacctccaaatcttggctgcatggaagtatctttggtgacatcaactcttctccaagtgaagacaactggttgaaggggaccaggaggttggacacagaccattgcaatggaaatgcagatgatttagactgttcttctctgactgatgactgggagtcagggaagatgaatgcagagtctgtgatcacctcctcttccagccacatcatatctcagcctcctggaggaaactcccatagcttgtctcttcagtcccagttgacagcttctgaacgtttccaagagaatagttcggatcattcagaaaccaggttgttgcaagaggtcttctttcaggcaatcctgcttgctgtgtgcttaatcacttctgcatgtgcaagatggtttatgggagaaatattagccagtgtcttcacatgctcattgatgataactgtagcttatgtgaaatcattgtttctcagccttgccagctatttcaaaaccactgcctgtgctcggtttgtcaaaatttgacaaccatttaggaatgccttcgatgaatgtcctccatctgaatatctggaaattgtccaacttgcagtctacttggaatcaagtgttttattggaagggagtaagcgagtaatggagaaaaagccattttagtttgactatgtgattttaaaatgatctcagtttttccatcaaaattataatatgctcatgaaaataatattaatttgccttccctttgcaaacaccggcagttgaaaggaaaaggacggggaatgtgatggaaaagagaccgcctggaataaatgtccccctatgattctttaaggcagtggttctcgagcttgaattttcattaggaaattctgtgaggagcttgtaaccagatttctgggtctgccacatgcacctatctcttgctgaattgctttaatagaataatgagagcaagtttgtctaactaataccaacctgacaacttgaataacaataaatgcaatttgtacataaaatataatgctgcaaaagtttgtcattcacctcagtggagtgacttgatattaggtggtaaccgtagatgatggttaatatgaaaatggacaggaaagaagcattttctgaaagttatattcttttgaaccacgttctaaaccaagtttttaatcttcttggggctcgtaattacctttcactttaatgtcacttaaagatataacacagaaaaatgccttgagggcaaaatataggcaaaacaccaatgcgctttcaaatgcatgaaaatggtgcagttgtacccttgagccttgactcaagggctgtagatgttccctttccaccccccacacttggtgcgtgttcacaaagcaaatatggcctgtaattcaaatttgttctatgtgatactctctgagtaaaaactcatacatgcagaaaattgtctttgctcgaaatgataatgccaaaatataactttatatataatttgcatttagtacatttttggttaaaaaataaactaataaataagtgaagtcatcagc

SEQ ID NO: 132 - protein, 276 aa, Homo sapiens
MYRISQLMSTPVASSSRLEREYAGELSPTCIFPSFTCDSLDGYHSFECGSIDPLTGSHYTCRRSPRLLTNGYYIWTEDSFLCDKDGNITLNPSQTSVMYKENLVSTSKSWLHGSIFGDINSSPSEDNWLKGTRRLDTDHCNGNADDLDCSSLTDDWESGKMNAESVITSSSSHIISQPPGGNSHSLSLQSQLTASERFQENSSDHSETRLLQEVFFQAILLAVCLITSACARWFMGEILASVFTCSLMITVAYVKSLFLSLASYFKTTACARFVKI

SEQ ID NO: 133 - DNA, 6550 bp, Homo sapiens
  CDS (165)..(4445)
tcccggaaggcaaatggctggcgtggaagcacaacccgctttcactcttcgaatttgtgcttagctcttttcttgtaccttgcgactcgtgaccaacatgctgtgatgtgtgccgagggaggaattggtcagctacacaacctggatcttaccacagtttggatatgactgaggctctccaatgggccagatatcactggcgacggctgatcagaggtgcaaccagggatgatgattcagggccatacaactattcctcgttgctcgcctgtgggcgcaagtcctctcagacccctaaactgtcaggaaggcaccggattgttgttccccacatccagcccttcaaggatgagtatgagaagttctccggagcctatgtgaacaatcgaatacgaacaacaaagtacacacttctgaattttgtgccaagaaatttatttgaacaatttcacagagctgccaatttatatttcctgttcctagttgtcctgaactgggtacctttggtagaagccttccaaaaggaaatcaccatgttgcctctggtggtggtccttacaattatcgcaattaaagatggcctggaaggttatcggaaatacaaaattgacaaacagatcaataatttaataactaaagtttatagtaggaaagagaaaaaatacattgaccgatgctggaaagacgttactgttggggactttattcgcctctcctgcaacgaggtcatccctgcagacatggtactactcttttccactgatccagatggaatctgtcacattgagacttctggtcttgatggagagagcaatttaaaacagaggcaggtggttcggggatatgcagaacaggactctgaagttgatcctgagaagttttccagtaggatagaatgtgaaagcccaaacaatgacctcagcagattccgaggcttcctagaacattccaacaaagaacgcgtgggtctcagtaaagaaaatttgttgcttagaggatgcaccattagaaacacagaggctgttgtgggcattgtggtttatgcaggccatgaaaccaaagcaatgctgaacaacagtgggccacggtataagcgcagcaaattagaaagaagagcaaacacagatgtcctctggtgtgtcatgcttctggtcataatgtgcttaactggcgcagtaggtcatggaatctggctgagcaggtatgaaaagatgcattttttcaatgttcccgagcctgatggacatatcatatcaccactgttggcaggattttatatgttttggaccatgatcattttgttacaggtcttgattcctatttctctctatgtttccatcgaaattgtgaagcttggacaaatatatttcattcaaagtgatgtggatttctacaatgaaaaaatggattctattgttcagtgccgagccctgaacatcgccgaggatctgggacagattcagtacctcttttccgataagacaggaaccctcactgagaataagatggtttttcgaagatgtagtgtggcaggatttgattactgccatgaagaaaatgccaggaggttggagtcctatcaggaagctgtctctgaagatgaagattttatagacacagtcagtggttccctcagcaatatggcaaaaccgagagcccccagctgcaggacagttcataatgggcctttgggaaataagccctcaaatcatcttgctgggagctcttttactctaggaagtggagaaggagccagtgaagtgcctcattccagacaggctgctttcagtagccccattgaaacagacgtggtaccagacaccaggcttttagacaaatttagtcagattacacctcggctctttatgccactagatgagaccatccaaaatccaccaatggaaactttgtacattatcgactttttcattgcattggcaatttgcaacacagtagtggtttctgctcctaaccaaccccgacaaaagatcagacacccttcactgggggggttgcccattaagtctttggaagagattaaaagtcttttccagagatggtctgtccgaagatcaagttctccatcgcttaacagtgggaaagagccatcttctggagttccaaacgcctttgtgagcagactccctctctttagtcgaatgaaaccagcttcacctgtggaggaagaggtctcccaggtgtgtgagagcccccagtgctccagtagctcagcttgctgcacagaaacagagaaacaacacggtgatgcaggcctcctgaatggcaaggcagagtccctccctggacagccattggcctgcaacctgtgttatgaggccgagagcccagacgaagcggccttagtgtatgccgccagggcttaccaatgcactttacggtctcggacaccagagcaggtcatggtggactttgctgctttgggaccattaacatttcaactcctacacatcctgccctttgactcagtaagaaaaagaatgtctgttgtggtccgacaccctctttccaatcaagttgtggtgtatacgaaaggcgctgattctgtgatcatggagttactgtcggtggcttccccagatggagcaagtctggagaaacaacagatgatagtaagggagaaaacccagaagcacttggatgactatgccaaacaaggccttcgtactttatgtatagcaaagaaggtcatgagtgacactgaatatgcagagtggctgaggaatcattttttagctgaaaccagcattgacaacagggaagaattactacttgaatctgccatgaggttggagaacaaacttacattacttggtgctactggcattgaagaccgtctgcaggagggagtccctgaatctatagaagctcttcacaaagcgggcatcaagatctggatgctgacaggggacaagcaggagacagctgtcaacatagcttatgcatgcaaactactggagccagatgacaagctttttatcctcaatacccaaagtaaagatgcctgtgggatgctgatgagcacaattttgaaagaacttcagaagaaaactcaagccctgccagagcaagtgtcattaagtgaagatttacttcagcctcctgtcccccgggactcagggttacgagctggactcattatcactgggaggaccctggagtttgccctgcaagaaagtctgcaaaagcagttcctggaactgacatcttggtgtcaagctgtggtctgctgccgagccacaccgctgcagaaaagtgaagtggtgaaattggtccgcagccatctccaggtgatgacccttgctattggtgatggtgccaatgatgttagcatgatacaagtggcagacattgggataggggtctcaggtcaagaaggcatgcaggctgtgatggccagtgactttgccgtttatcagttcaaacatctcagcaagctccttcttgtccatggacactggtgttatacacggctttccaacatgattctctattttttctataagaatgtggcctatgtgaacctccttttctggtaccagttcttttgtggattttcagggacatccatgactgattactgggttttgatcttcttcaacctcctcttcacatctgcccctcctgtcatttatggtgttttggagaaagatgtgtctgcagagaccctcatgcaactgcctgaactttacagaagtggtcagaaatcagaggcatacttaccccataccttctggatcaccttattggatgctttttatcaaagcctggtctgcttctttgtgccttattttacctaccagggctcagatactgacatctttgcatttggaaaccccctgaacacagccgctctgttcatcgttctcctccatctggtcattgaaagcaagagtttgacttggattcacttgctggtcatcattggtagcatcttgtcttattttttatttgccatagtttttggagccatgtgtgtaacttgcaacccaccatccaacccttactggattatgcaggagcacatgctggatccagtattctacttagtttgtatcctcacgacgtccattgctcttctgcccaggtttgtatacagagttcttcagggatccctgtttccatctccaattctgagagctaagcactttgacagactaactccagaggagaggactaaagctctcaagaagtggagaggggctggaaagatgaatcaagtgacatcaaagtatgctaaccaatcagctggcaagtcaggaagaagacccatgcctggcccttctgctgtatttgcaatgaagtcagcaagttcctgtgctattgagcaaggaaacttatctctgtgtgagactgctttagatcaaggctactctgaaactaaggcctttgagatggctggaccctccaaaggtaaagaaagctagataccctccttggagttgcaagtattctttcaaggttggaagagggattttgaagaggtatctctccaagcaagaatgacttgtttttccataagggacatgagcattttactaggcttggaagagctgacatgatgagcattattgtatgtttgtatatacatttgtgatagagggctagagtttgacctagagagagtttaaggaagtgaaatatttaattcagaaccaaatgcttttgtaaaactttttggattttgtaaaagcattttcattctcttagaaattcaagtattttcaaggggagtcatttgagatatatttattttactaggagatcttatattctagggaaatgctttaaatggtcaggctccagtcggaatttttttaagaaaaaagtagtttttaatacattggttaggactcagaggaaatacggaaaaaacattgtagatggttaatttacagataaaatcccaagagccttttaaacaacaaggtacctaaaatagggtataattatactgcttaaaatacagttagtgcctattaatagctttttatttcctatgggaagatgcttttggtcttctggctgaagatgtaggcatacctctcactcatttcaatgttttcctgaggtggagccttcattggaaaggggaaagagggattctagggtttcatcagggaccaggaatgcattcctctgtcaggttccaatcaagagaagaccttttatgagatctgcctctgtatagatgttgtcagttaggaaactgaagccataggtcaggcagacatcagctcagcctgtggcccattgggtgatttcctgtattttaaaactgacagtagcctgatcaaagtgatacaatcaatttcaaaacaatcttccagagaccacttgaaggttcatagtttttacaataccctgagacttttcaggtgttggagcctctaaaatatgagatataaacagaaactaatacaagttgttctctggaggtttctatgaggttcttagaaaaatttggttttaaaatcatttgaggacaggaatgtctatagcaagtttactcctattgcgaatcatgtatgctggctttagttgtaacaaacgattttattctaagtaaggccaggtgctactataaaatcatatattcctgttgaagttcttttgaagtcctatctctatttattatatttgaaagttgtcagccaccagtcatccagaatttccttcctgaatctccatgctcatatgcaatgtctacatcaaggtcttcttaatgactattattctcagggtttagttttctaccttctgcctactattttggtctgacatttttgtagccttctgttattattggaaatagtctcttacataagctgatttcgagaactttcaaaatctcacatagctaatggaagttgctttctgctttcttatgactgtttttataaataaactgtttcataaataatgtatactggaaaattgtcatcactcttgtaaacatttgccaaatccaactgtaattagtaccagaacttagaaggaaagtcacaaagcatgccttttaccagaatattgctttgccttttcttatatggaaaatcactgatgtcatatcatttattatcctcacagcagctggcattcattccctgaaatcgtcgtctcctgataaacaataatttagagatatgttcacttgtaaataaaaaggttagaatctaaggacaaagaatgatccaaaaatactaaggaaaaagaacaattttcaattttcagaaatgaattatctgtacatatgaatagaggaaaatactgagtgctaatgttacagggccacaatctcatatccacaattccaaaatctccaaacctctgaaaactgaaatatttttcataaattaggcgtaaattctatgccctgaacaaatgtaaagctatttatgtactttgcttaatgtaatcattcatatactttgctacaaaaatattaatatatttcattactgaatgctaaactgtatttctttttaaaatttggaaaatttttaattctgaaacacaatctagaccttag

SEQ ID NO: 134 - protein, 1426 aa, Homo sapiens
MTEALQWARYHWRRLIRGATRDDDSGPYNYSSLLACGRKSSQTPKLSGRHRIVVPHIQPFKDEYEKFSGAYVNNRIRTTKYTLLNFVPRNLFEQFHRAANLYFLFLVVLNWVPLVEAFQKEITMLPLVVVLTIIAIKDGLEGYRKYKIDKQINNLITKVYSRKEKKYIDRCWKDVTVGDFIRLSCNEVIPADMVLLFSTDPDGICHIETSGLDGESNLKQRQVVRGYAEQDSEVDPEKFSSRIECESPNNDLSRFRGFLEHSNKERVGLSKENLLLRGCTIRNTEAVVGIVVYAGHETKAMLNNSGPRYKRSKLERRANTDVLWCVMLLVIMCLTGAVGHGIWLSRYEKMHFFNVPEPDGHIISPLLAGFYMFWTMIILLQVLIPISLYVSIEIVKLGQIYFIQSDVDFYNEKMDSIVQCRALNIAEDLGQIQYLFSDKTGTLTENKMVFRRCSVAGFDYCHEENARRLESYQEAVSEDEDFIDTVSGSLSNMAKPRAPSCRTVHNGPLGNKPSNHLAGSSFTLGSGEGASEVPHSRQAAFSSPIETDVVPDTRLLDKFSQITPRLFMPLDETIQNPPMETLYIIDFFIALAICNTVVVSAPNQPRQKIRHPSLGGLPIKSLEEIKSLFQRWSVRRSSSPSLNSGKEPSSGVPNAFVSRLPLFSRMKPASPVEEEVSQVCESPQCSSSSACCTETEKQHGDAGLLNGKAESLPGQPLACNLCYEAESPDEAALVYAARAYQCTLRSRTPEQVMVDFAALGPLTFQLLHILPFDSVRKRMSVVVRHPLSNQVVVYTKGADSVIMELLSVASPDGASLEKQQMIVREKTQKHLDDYAKQGLRTLCIAKKVMSDTEYAEWLRNHFLAETSIDNREELLLESAMRLENKLTLLGATGIEDRLQEGVPESIEALHKAGIKIWMLTGDKQETAVNIAYACKLLEPDDKLFILNTQSKDACGMLMSTILKELQKKTQALPEQVSLSEDLLQPPVPRDSGLRAGLIITGRTLEFALQESLQKQFLELTSWCQAVVCCRATPLQKSEVVKLVRSHLQVMTLAIGDGANDVSMIQVADIGIGVSGQEGMQAVMASDFAVYQFKHLSKLLLVHGHWCYTRLSNMILYFFYKNVAYVNLLFWYQFFCGFSGTSMTDYWVLIFFNLLFTSAPPVIYGVLEKDVSAETLMQLPELYRSGQKSEAYLPHTFWITLLDAFYQSLVCFFVPYFTYQGSDTDIFAFGNPLNTAALFIVLLHLVIESKSLTWIHLLVIIGSILSYFLFAIVFGAMCVTCNPPSNPYWIMQEHMLDPVFYLVCILTTSIALLPRFVYRVLQGSLFPSPILRAKHFDRLTPEERTKALKKWRGAGKMNQVTSKYANQSAGKSGRRPMPGPSAVFAMKSASSCAIEQGNLSLCETALDQGYSETKAFEMAGPSKGKES

SEQ ID NO: 135 - DNA, 1254 bp, Homo sapiens
  CDS (33)..(503)
ctcacttggccttacactccgctcggctcaccatgtgtcactctcgcagctgccacccgaccatgaccatcctgcaggccccgaccccggccccctccaccatcccgggaccccggcggggctccggtcctgagatcttcaccttcgaccctctcccggagcccgcagcggcccctgccgggcgccccagcgcctctcgcgggcaccgaaagcgcagccgcagggttctctaccctcgagtggtccggcgccagctgccagtcgaggaaccgaacccagccaaaaggcttctctttctgctgctcaccatcgtcttctgccagatcctgatggctgaagagggtgtgccggcgcccctgcctccagaggacgcccctaacgccgcatccctggcgcccacccctgtgtccgccgtcctcgagccctttaatctgacttcggagccctcggactacgctctggacctcagcactttcctccagcaacacccggccgccttctaactgtgactccccgcactccccaaaaagaatccgaaaaaccacaaagaaacaccaggcgtacctggtgcgcgagagcgtatccccaactgggacttccgaggcaacttgaactcagaacactacagcggagacgccacccggtgcttgaggcgggaccgaggcgcacagagaccgaggcgcatagagaccgaggcacagcccagctggggctaggcccggtgggaaggagagcgtcgttaatttatttcttattgctcctaattaatatttatatgtatttatgtacgtcctcctaggtgatggagatgtgtacgtaatatttattttaacttatgcaagggtgtgagatgttccccctgctgtaaatgcaggtctcttggtatttattgagctttgtgggactggtggaagcaggacacctggaactgcggcaaagtaggagaagaaatggggaggactcgggtgggggaggacgtcccggctgggatgaagtctggtggtgggtcgtaagtttaggaggtgactgcatcctccagcatctcaactccgtctgtctactgtgtgagacttcggcggaccattaggaatgagatccgtgagatccttccatcttcttgaagtcgcctttagggtggctgcgaggtagagggttgggggttggtgggctgtcacggagcgactgtcgagatcgcctagtatgttctgtgaacacaaataaaattgatttactgtctgcaaaaaaaaaaaaaaa

SEQ ID NO: 136 - protein, 156 aa, Homo sapiens
MCHSRSCHPTMTILQAPTPAPSTIPGPRRGSGPEIFTFDPLPEPAAAPAGRPSASRGHRKRSRRVLYPRVVRRQLPVEEPNPAKRLLFLLLTIVFCQILMAEEGVPAPLPPEDAPNAASLAPTPVSAVLEPFNLTSEPSDYALDLSTFLQQHPAAF

SEQ ID NO: 137 - DNA, 2826 bp, Homo sapiens
  CDS (1035)..(2534)
gctccaagaaaccagccaacggctggaggatgtggaggagcaggtagggtggctcatggctacattagattcaggggacatctcctcagatgccctgcaaaccatgaaataaaaatggaggaggaacaacaacaacaaacaaaaaaaaaaagcaaagaggaactgcaagttcagtccctagcgactaacagtgagcagaggaagtaaagggggagttgtaagagaggcggtatcaacagcctgctgatgaaagaggcgactctgcagaaagaggcaacttgacatatcaggactttaaccgctgtagaaatagctcaggcataccaagcccatgcaaacacagaattgcagaagttcaggagaggcttatcacttccctgagaagaaaaacacattttcagttttgcctgcatcataagagtgagcactccattgctttctttcctggccacactgctacaatccagcactaactatccatgtccagggtaaggatcgagatcgagaagcccacactgccagtgaaaaagctacgtctttactgcataaattagaggaagcaatttcggaacaacggaaccttcaaactataaatactgaattatcgaacacttgccaggcacttcagcagaagacaaggaaactgaagaagctttttagatgaggaatttcctcactatgattccctgtcctgcgcagatgcaattcaacaacctcttcaagaaaaattgaagcagtgttgccacaaactatatggtggtcaagaagcaagaatacatcagacacccctgaccttgaaacatacgtgctggtacacacctctgctggatgccttatctctggatagttttacagcagttccaaccctggaatcaacacctttctcaggtgtagccaaccaaatccacactctgtgtgaaaggcccacatatggagaagtaaaggatggtgctttggatgtaaaaagacaacacaagtgcccaggccccacaagtggccccagcccaggaacgaatctctcaggctgcatcaggatgaatgatgacccaagtatggaagagaatggtgttgaacgcgtgtgtcctgagagcctgctgcagtccagggaatattcctcactaccattacccagacacacttcatcgacagacggtactataacttcaagtgatcctggattagaaattctgaatatggcttcttgtgaccttgacagaaactcgctctgtaagaaagaggaggatacaagatcagcttctcccacgatagaggcccaaggcacaagtccagctcatgataatattgcattccaagactctacgagtaaggataaaaccatattaaatctggaagccaaagaggaaccagaaacaatagaagaacataaaaaagaacatgcttcaggagactctgtggtttcccctcttcctgtaaccactgtgaaatcggttaaccttagacaaagtgagaacacttctgctaatgagaaggaggtggaggcagaatttctcagattatctttgggatttaagtgtgactggtttaccttggagaagagagtgaagcttgaagagaggtcccgtgacttggcagaagaaaatttgaagaaagaaatcactaactgtttaaaactattagagtctttaacacctctgtgtgaagatgacaaccaggcacaggaaatcattaagaagctggagaagagtataaagtttcttagccagtgtgcagcacgagtggccagtagggctgagatgttgggagccatcaatcaggaaagccgggttagtaaagcagttgaagtgatgattcagcacgtagaaaacttgaagaggatgtatgccaaagagcacgctgaattagaagaactgaaacaggttcttctgcagaatgaaaggtctttcaatcctcttgaagatgatgatgactgccaaattaaaaaacgttcagcttctctaaactccaagccatcttctctacgaagagtgactattgcctctttacccagaaatattggaaatgcaggaatggtggctgggatggaaaataatgatcgattcagtagaaggtcaagcagttggcgtattttggggtcaaagcagagtgaacaccgtccctcattacctcgatttattagcacctattcctgggcagatgctgaagaagaaaaatgtgaactaaaaactaaagatgactcagagccatctggagaagaaacagtagaaaggacaaggaagccaagtctttctgaaaagaaaaataatccatcaaagtgggatgtctcttcagtttatgacacaatagcttcctgggcaacaaatctcaagtcctccatcagaaaggctaataaggccctctggctctctattgcattcattgtactgtttgcagctttgatgagcttcctcacaggccaattattccagaagtctgtggatgccgctcccacacagcaagaggactcatggacgtctctagaacatatcttgtggccatttaccagactccgacacaatgggccaccaccagtgtgacagcaggacatcctaatatatggatcttgatttttaagtttcagtatctgaacttcgtaaattagtaacttttagctgggaaagtatagcatgaaaccagaggttctcagaatgactgtaagatagcttacatttcctctttttgcctttatctccccaactaaaatacaatggggaagaagtctgcctatgatctttgaatgagctttttaaggaagaaatattatatattgtttgttaaagtttattgaaataaagaatcatttaaatcttcaaaaaaaaaaaaaaaaaa

SEQ ID NO: 138 - protein, 499 aa, Homo sapiens
MNDDPSMEENGVERVCPESLLQSREYSSLPLPRHTSSTDGTITSSDPGLEILNMASCDLDRNSLCKKEEDTRSASPTIEAQGTSPAHDNIAFQDSTSKDKTILNLEAKEEPETIEEHKKEHASGDSVVSPLPVTTVKSVNLRQSENTSANEKEVEAEFLRLSLGFKCDWFTLEKRVKLEERSRDLAEENLKKEITNCLKLLESLTPLCEDDNQAQEIIKKLEKSIKFLSQCAARVASRAEMLGAINQESRVSKAVEVMIQHVENLKRMYAKEHAELEELKQVLLQNERSFNPLEDDDDCQIKKRSASLNSKPSSLRRVTIASLPRNIGNAGMVAGMENNDRFSRRSSSWRILGSKQSEHRPSLPRFISTYSWADAEEEKCELKTKDDSEPSGEETVERTRKPSLSEKKNNPSKWDVSSVYDTIASWATNLKSSIRKANKALWLSIAFIVLFAALMSFLTGQLFQKSVDAAPTQQEDSWTSLEHILWPFTRLRHNGPPPV

SEQ ID NO: 139 - DNA, 3432 bp, Homo sapiens
  CDS (593)..(2059)
gcgagagcggagctccaagcccggcagcccgagaggaagatgaacagccccaggccagagcctctggcagagtggaccccgagccgcccccaggtagccaggagcggcctcagcggcagccgcaaactccagtagccgcccgtgctgcccgtggctggggcggagggcagccagagctggggaccaaggctccgcgccacctgcgcgcacagcctcacacctgaacgctgtcctcccgcagacgagaccggcgggcactgcaaagctgggactcgtctttgaaggaaaaaaaatagcgagtaagaaatccagcaccattcttcactgacccatcccgctgcacctcttgtttcccaagtttttgaaagctggcaactctgacctcggtgtccaaaaatcgacagccactgagaccggctttgagaagccgaagatttggcagtttccagactgagcaggacaaggtgaaagcaggttggaggcgggtccaggacatctgagggctgaccctgggggctcgtgaggctgccaccgctgctgccgctacagacccagccttgcactccaaggctgcgcaccgccagccactatcatgtccactcccggggtcaattcgtccgcctccttgagccccgaccggctgaacagcccagtgaccatcccggcggtgatgttcatcttcggggtggtgggcaacctggtggccatcgtggtgctgtgcaagtcgcgcaaggagcagaaggagacgaccttctacacgctggtatgtgggctggctgtcaccgacctgttgggcactttgttggtgagcccggtgaccatcgccacgtacatgaagggccaatggcccgggggccagccgctgtgcgagtacagcaccttcattctgctcttcttcagcctgtccggcctcagcatcatctgcgccatgagtgtcgagcgctacctggccatcaaccatgcctatttctacagccactacgtggacaagcgattggcgggcctcacgctctttgcagtctatgcgtccaacgtgctcttttgcgcgctgcccaacatgggtctcggtagctcgcggctgcagtacccagacacctggtgcttcatcgactggaccaccaacgtgacggcgcacgccgcctactcctacatgtacgcgggcttcagctccttcctcattctcgccaccgtcctctgcaacgtgcttgtgtgcggcgcgctgctccgcatgcaccgccagttcatgcgccgcacctcgctgggcaccgagcagcaccacgcggccgcggccgcctcggttgcctcccggggccaccccgctgcctccccagccttgccgcgcctcagcgactttcggcgccgccggagcttccgccgcatcgcgggcgccgagatccagatggtcatcttactcattgccacctccctggtggtgctcatctgctccatcccgctcgtggtgcgagtattcgtcaaccagttatatcagccaagtttggagcgagaagtcagtaaaaatccagatttgcaggccatccgaattgcttctgtgaaccccatcctagacccctggatatatatcctcctgagaaagacagtgctcagtaaagcaatagagaagatcaaatgcctcttctgccgcattggcgggtcccgcagggagcgctccggacagcactgctcagacagtcaaaggacatcttctgccatgtcaggccactctcgctccttcatctcccgggagctgaaggagatcagcagtacatctcagaccctcctgccagacctctcactgccagacctcagtgaaaatggccttggaggcaggaatttgcttccaggtgtgcctggcatgggcctggcccaggaagacaccacctcactgaggactttgcgaatatcagagacctcagactcttcacagggtcaggactcagagagtgtcttactggtggatgaggctggtgggagcggcagggctgggcctgcccctaaggggagctccctgcaagtcacatttcccagtgaaacactgaacttatcagaaaaatgtatataataggcaaggaaagaaatacagtactgtttctggacccttataaaatcctgtgcaatagacacatacatgtcacatttagctgtgctcagaagggctatcatcatcctacaactcacattagagaacatcctggcttttgagcacttttcaaacaatcaagttgactcacgtgggtcctgaggcctgcagcacgtcggatgctaccccactatgacagaggattgtggtcacaacttgatggctgcgaagacctaccctccgtttttctactagataggaggatggtagaagtttggctgctgtcataacatccagagctttgtcgtatttggcacacagcagaggcccagatattagaaaggctctattccaataaactatgaggactgccttatggatgatttaagtgtctcactaaagcatgaaatgtgaatttttattgttgtacatacgatttaaggtatttaaagtattttcttctctgtgagaaggtttattgttaatacaaggtataataaaattatcgcaacccctctccttccagtataaccagctgaagttgcagatgttagatatttttcataaacaagttcgagtcaaagttgaaaattcatagtaagattgatatctataaaatagatataaatttttaagagaaagaatttagtattatcaaagggataaagaaaaaaatactatttaagatgtgaaaattacagtccaaaatactgttctttccaggctatgtataaaatacatagtgaaaattgtttagtgatattacatttatttatccagaaaactgtgatttcaggagaacctaacatgctggtgaatattttcaactttttccctcactaattggtacttttaaaaacataacataaattttttgaagtctttaataaataacccataattgaagtgtataatataaaaaattttaaaaatctaagcagcttattgtttctctgaaagtgtgtgtagttttactttcctaaggaattaccaagaatatcctttaaaatttaaaaggatggcaagttgcatcagaaagctttattttgagatgtaaaaagattcccaaacgtggttacattagccattcatgtatgtcagaagtgcagaattggggcacttaatggtcaccttgtaacagttttgtgtaactcccagtgatgctgtacacatatttgaagggtctttctcaaagaaatattaagcatgttttgttgctcagtgtttttgtgaattgcttggttgtaattaaattctgagcctgatattgatatggttttaagaagcagttgtaccaagtgaaattattttggagattataataaatatatacattcaaaaaaaaaaaaaaaaaa

SEQ ID NO: 140 - protein, 488 aa, Homo sapiens
MSTPGVNSSASLSPDRLNSPVTIPAVMFIFGVVGNLVAIVVLCKSRKEQKETTFYTLVCGLAVTDLLGTLLVSPVTIATYMKGQWPGGQPLCEYSTFILLFFSLSGLSIICAMSVERYLAINHAYFYSHYVDKRLAGLTLFAVYASNVLFCALPNMGLGSSRLQYPDTWCFIDWTTNVTAHAAYSYMYAGFSSFLILATVLCNVLVCGALLRMHRQFMRRTSLGTEQHHAAAAASVASRGHPAASPALPRLSDFRRRRSFRRIAGAEIQMVILLIATSLVVLICSIPLVVRVFVNQLYQPSLEREVSKNPDLQAIRIASVNPILDPWIYILLRKTVLSKAIEKIKCLFCRIGGSRRERSGQHCSDSQRTSSAMSGHSRSFISRELKEISSTSQTLLPDLSLPDLSENGLGGRNLLPGVPGMGLAQEDTTSLRTLRISETSDSSQGQDSESVLLVDEAGGSGRAGPAPKGSSLQVTFPSETLNLSEKCI

SEQ ID NO: 141 - DNA, 1537 bp, Homo sapiens
  CDS (401)..(1414)
gaggaagaagaatctgtatatctgtatatattggctagcaaatgtgccctgctctctcccctcttaaaaatagcagcaacccatctttgcaaagaagcttgcctatagagcaggcactctgtgaatggactgtgcttttacgaccctacagggtatcaagatactgtgcagctcgccaacaaggattaattgcaaggactggtagatcgaatttactgaagacttggagcttgcttctgagaacaaacgcaaaaggacagtaaactgtggaccttgaagttagcagcgtgggcttcctctaatattacaccgtaaaaggcattgatcaccataagaaggaacatttgtgaaggtactccagtgccagaaagaggcacaaagcagacattcgtagagaaacatggatgaaacaggaaatctgacagtatcttctgccacatgccatgacactattgatgacttccgcaatcaagtgtattccaccttgtactctatgatctctgttgtaggcttctttggcaatggctttgtgctctatgtcctcataaaaacctatcacaagaagtcagccttccaagtatacatgattaatttagcagtagcagatctactttgtgtgtgcacactgcctctccgtgtggtctattatgttcacaaaggcatttggctctttggtgacttcttgtgccgcctcagcacctatgctttgtatgtcaacctctattgtagcatcttctttatgacagccatgagctttttccggtgcattgcaattgtttttccagtccagaacattaatttggttacacagaaaaaagccaggtttgtgtgtgtaggtatttggatttttgtgattttgaccagttctccatttctaatggccaaaccacaaaaagatgagaaaaataataccaagtgctttgagcccccacaagacaatcaaactaaaaatcatgttttggtcttgcattatgtgtcattgtttgttggctttatcatcccttttgttattataattgtctgttacacaatgatcattttgaccttactaaaaaaatcaatgaaaaaaaatctgtcaagtcataaaaaggctataggaatgatcatggtcgtgaccgctgcctttttagtcagtttcatgccatatcatattcaacgtaccattcaccttcattttttacacaatgaaactaaaccctgtgattctgtccttagaatgcagaagtccgtggtcataaccttgtctctggctgcatccaattgttgctttgaccctctcctatatttcttttctgggggtaactttaggaaaaggctgtctacattcagaaagcattctttgtccagcgtgacttatgtacccagaaagaaggcctctttgccagaaaaaggagaagaaatatgtaaagtatagtttaaacccatttccagtccaaaccaatgaaaatagtttcccaaataagtattttgtcaaatcatttacaaaaaaaataaaaattttacttaatattttaaaaaaaaaaaaaaaaaaaaaaaa

SEQ ID NO: 142 - protein, 337 aa, Homo sapiens
MDETGNLTVSSATCHDTIDDFRNQVYSTLYSMISVVGFFGNGFVLYVLIKTYHKKSAFQVYMINLAVADLLCVCTLPLRVVYYVHKGIWLFGDFLCRLSTYALYVNLYCSIFFMTAMSFFRCIAIVFPVQNINLVTQKKARFVCVGIWIFVILTSSPFLMAKPQKDEKNNTKCFEPPQDNQTKNHVLVLHYVSLFVGFIIPFVIIIVCYTMIILTLLKKSMKKNLSSHKKAIGMIMVVTAAFLVSFMPYHIQRTIHLHFLHNETKPCDSVLRMQKSVVITLSLAASNCCFDPLLYFFSGGNFRKRLSTFRKHSLSSVTYVPRKKASLPEKGEEICKV

SEQ ID NO: 143 - DNA, 5679 bp, Homo sapiens
  CDS (143)..(3721)
gcttttctccttggcatggtcacggaatggatacctgtttgatcttcctgcactgctgagaaatcttccttttgggggagaggattaagtctgggttgaggtaggccacctgttgagacctggtgaaagatcaggtataataatgttctgcagtgaaaagaaattgcgtgaagtggaacggatagtgaaagccaatgaccgtgaatataatgaaaagttccagtatgcggataatcgtatccacacatcgaaatataatattctcaccttcttgccaattaatttatttgaacagttccaaagagtggcaaatgcctattttctttgccttctgattttacagctaattccagaaatttcctccttgacctggtttaccaccattgtgcctttggtcctggtgataactatgacagctgtcaaagatgccacagatgactattttcgccacaagagtgataatcaagtgaataatcggcagtctgaagtgctcatcaacagcaaactgcagaatgaaaaatggatgaatgtcaaagtgggagacatcattaaattagaaaataaccaatttgttgctgctgatttacttctcctatcaagtagtgagccacatggtctctgttatgttgaaactgctgagcttgatggggaaacgaacctaaaagtccgccatgcactatcagttacttcagaacttggagcagatatcagcagacttgcagggtttgatgggattgttgtctgtgaggtgcctaacaacaagttagataaattcatgggaatcctttcttggaaagacagcaagcattccctcaacaatgagaagataatcctgagaggctgcatcctgagaaataccagctggtgttttggaatggttatttttgcaggtcctgacactaaactaatgcagaatagtggtaagacaaagtttaaaaggacaagcattgatagattgatgaatactctagtactatggatttttgggtttctgatatgcttgggaattattcttgcaataggaaattcaatctgggagagtcaaactggggaccaattcagaactttcctcttttggaatgaaggagagaagagctctgtgttctccggattcttaacattctggtcatatattattattctcaatacagttgtacccatttccttatatgtgagtgtggaagtaattcgtctaggacacagttattttataaactgggaccggaagatgtattattctcgaaaagcaatacctgcagtggctcgaacgaccacgctcaatgaggaactggggcagattgagtacattttctccgacaaaacgggtaccctcactcaaaacatcatgacctttaaaagatgttccattaatgggagaatctatggtgaagtacatgatgacctggatcagaagacagaaataactcaggaaaaagagcctgtggatttctcagtcaaatctcaagcggatagagaatttcagttctttgaccaccatctgatggaatccattaaaatgggtgatcccaaagttcatgaattccttaggttacttgctctctgccacactgtaatgtcagaagagaatagcgcaggagagctgatttaccaagttcagtcacctgatgaaggggctctagtgactgccgctagaaattttgggttcatttttaaatcccggaccccagagaccataacaatagaagaattgggaacactagttacttatcaattacttgcctttttggatttcaacaacaccagaaaaaggatgtctgtcatagttcgaaacccagaaggacagataaagctttattccaaaggagcagatactattctgtttgaaaaacttcatccttccaatgaagtccttttgtctttgacgtcagaccacctcagtgaatttgcaggggaaggccttcggaccttggccatcgcatacagagacctggatgacaagtactttaaagagtggcataagatgcttgaagatgcgaatgctgccacagaagagagggatgaacgaatagctgggctatatgaagaaattgaaagagatttgatgctactaggtgccactgctgtagaagataagttacaggagggtgttattgaaacagttacaagtttatcactagccaatattaagatctgggtcctaacaggagacaaacaagaaactgccatcaacatcggttatgcctgcaacatgctgactgacgacatgaatgatgtgtttgtgatagcagggaataatgctgtggaagtgagagaagaactcaggaaagcaaaacaaaatttgtttggacaaaacagaaatttttccaatggccatgtagtttgtgaaaaaaagcagcagctggagttggattctattgtagaagaaaccataacaggagattatgccttaatcataaatggccacagtttggctcatgccctagaaagtgatgtcaagaatgatctcctagaacttgcttgcatgtgtaagactgtaatttgctgcagggtcactccactccagaaagcccaagtggtagagctggtgaagaagtacagaaatgctgttactttggccattggtgatggagccaatgatgtcagcatgattaaaagtgctcacattggtgttggcatcagcggccaggaaggattgcaagcagtcttagccagcgactattcatttgcacagtttagatatctccaaaggcttctccttgttcatggaaggtggtcttatttccgaatgtgcaaattcttatgctatttcttctataagaattttgcatttacacttgtgcatttctggtttggtttcttctgtggtttctcagcccagactgtttatgaccagtggttcatcaccctttttaacattgtttacacatcactgcctgttttagccatggggatttttgaccaggatgtgagtgaccagaacagcgtggactgtccccagctctacaaaccaggacagctgaatctgctttttaacaagcgtaaatttttcatttgcgtgttgcatggaatctacacctcattagtccttttcttcatcccctatggggccttttacaacgtggctggagaagatgggcaacatattgctgactaccagtcctttgcagttaccatggccacatctttggtcattgtggtcagtgtgcagatagccttggataccagttactggactttcattaatcacgtcttcatctgggggagcattgccatttatttctccattttatttacaatgcacagtaatggcatctttggcatcttcccaaaccagtttccatttgttggtaatgcacgacattccctgacccagaagtgcatctggcttgtaattctcttaacaacagtggcttcagttatgccagtggtggcattcagatttttgaaggtggatttatacccaaccctgagtgatcagatccgccggtggcagaaggctcaaaagaaggcaaggcctccaagtagccgaaggcctcggacccgcaggtcaagctcaagaaggtctggatatgcttttgctcaccaagaaggctatggagagcttatcacatctggaaaaaatatgcgagctaaaaatccacccccaacatcagggctggaaaagacacattataatagcactagctggattgaaaatttatgtaagaaaaccacagacaccgtgagcagctttagccaggataaaacagtgaaactgtgagtcaatatgaatttaaaccacgtagttatcttttcacttcaggtggagctgaaattctgctggctccagagtttgagatttgaggcaagaggtggggcaggcagattgcctcacttaacttaaatctgcggcagacaactgccagtgcccatcaaacaggagtgtgcgctatggaaaaccaggccagagggtcactgtctggtttgtgatttggtggacaaaacactcgctgttacaagtacagattttttttttttttaaatcaacctagataccaattgacctgaactttagaatcttatttatggagaaaaacttgtaaagctgcatattcactgaatggatcctcaggcggataaaagggtgcattttaaaggtatatatccaagctgaaaagcatgcctattgacagataaacatgtatctgtaagatcagcctttcccaaggtatacttttaaaatttaaagcgtgtactgtgttgctttcagactgagttgcatgtcactctttagtcttgatatctacctgtctgttcagccaggacaacaaatggcttccaagcctgaagaatacaaaagtgtgcttgtgtttctcatttttataccagtctagggacaaaggagactgaacatctttgcagcaggataggctggtaatttgatcaaatttattcaaaaagctctcagtctgtgtcatgtaaggacatgcttatgaaatgtgagagaggctcgccactaagtattctaaatacttttcaatggcttttctaacaacctcagtagtaatttgctgagcatcatccagaccattaatagaatcagcaaagcactggaatttcacactttaatgataatattccacatagtctatgggcaaatattttcaacatttccaatttttaaagcttcagaattgaagccaaacaaattaataaataattgttttaattactatttaaaaactcaggtttagattgtttaaaattagttgcttttgatactcagctgtcatgtttataattcaaacatgtagtaaacatatgtaggtaaggttgtttttttggagatgttgcagctcaaatttcagtccacatatgaatcatcagtgtattttccataaagtgattcgggcatatttgtgtgaaaacctcagttctgtcacttcttacctctataaacttggacgataatgtgccttctctgagactcagtttcttcctctgtaaaatgaggacatactacctacctcatgtggttggttgatgattgtctgtcaaagcacaaactctgaaattattaaaaacataattatttcataaacagatgagttaagttccagttaactcaacatcagtataacagagcaattggaagagaatatgaaaaaactggaatctaaatagtcagtgaggaaggctttgataaaatgaaattgccagaaagatataaaactggttagggtcctacagggaaataaaattataaccgtggaggtacatttctctaccagaaagcaaaaataaagcatcatgtcttaatggttttctacaaatcaacttctaattctacagagtccttaatctggtccctattaaattcttggtcagacaaagttacatttcccaagagagtcaggtgacacttgagtgagtttgatggataatgagctaatgtgatatctataggtcacaattttttaaaaccaaaattttcaagtctgggataatctttcctaaatgggatcaaatgaaataatatgtgtaaaagagtcaaatgcagtcctttaccatagtaactgcctatggacgttgtctttcccttacatgcctgcctacacttaaccagatgttggttttcaatgtctaatttgtcattagtttcaccacatttgctcactttttgtaacatttttgcaagatttgaaaactttcagtaaatgttttggcactattggtaaa

SEQ ID NO: 144 - protein, 1192 aa, Homo sapiens
MFCSEKKLREVERIVKANDREYNEKFQYADNRIHTSKYNILTFLPINLFEQFQRVANAYFLCLLILQLIPEISSLTWFTTIVPLVLVITMTAVKDATDDYFRHKSDNQVNNRQSEVLINSKLQNEKWMNVKVGDIIKLENNQFVAADLLLLSSSEPHGLCYVETAELDGETNLKVRHALSVTSELGADISRLAGFDGIVVCEVPNNKLDKFMGILSWKDSKHSLNNEKIILRGCILRNTSWCFGMVIFAGPDTKLMQNSGKTKFKRTSIDRLMNTLVLWIFGFLICLGIILAIGNSIWESQTGDQFRTFLFWNEGEKSSVFSGFLTFWSYIIILNTVVPISLYVSVEVIRLGHSYFINWDRKMYYSRKAIPAVARTTTLNEELGQIEYIFSDKTGTLTQNIMTFKRCSINGRIYGEVHDDLDQKTEITQEKEPVDFSVKSQADREFQFFDHHLMESIKMGDPKVHEFLRLLALCHTVMSEENSAGELIYQVQSPDEGALVTAARNFGFIFKSRTPETITIEELGTLVTYQLLAFLDFNNTRKRMSVIVRNPEGQIKLYSKGADTILFEKLHPSNEVLLSLTSDHLSEFAGEGLRTLAIAYRDLDDKYFKEWHKMLEDANAATEERDERIAGLYEEIERDLMLLGATAVEDKLQEGVIETVTSLSLANIKIWVLTGDKQETAINIGYACNMLTDDMNDVFVIAGNNAVEVREELRKAKQNLFGQNRNFSNGHVVCEKKQQLELDSIVEETITGDYALIINGHSLAHALESDVKNDLLELACMCKTVICCRVTPLQKAQVVELVKKYRNAVTLAIGDGANDVSMIKSAHIGVGISGQEGLQAVLASDYSFAQFRYLQRLLLVHGRWSYFRMCKFLCYFFYKNFAFTLVHFWFGFFCGFSAQTVYDQWFITLFNIVYTSLPVLAMGIFDQDVSDQNSVDCPQLYKPGQLNLLFNKRKFFICVLHGIYTSLVLFFIPYGAFYNVAGEDGQHIADYQSFAVTMATSLVIVVSVQIALDTSYWTFINHVFIWGSIAIYFSILFTMHSNGIFGIFPNQFPFVGNARHSLTQKCIWLVILLTTVASVMPVVAFRFLKVDLYPTLSDQIRRWQKAQKKARPPSSRRPRTRRSSSRRSGYAFAHQEGYGELITSGKNMRAKNPPPTSGLEKTHYNSTSWIENLCKKTTDTVSSFSQDKTVKL

SEQ ID NO: 145 - DNA, 7878 bp, Homo sapiens
  CDS (144)..(3689)
ttttccctgctctcaccgggcgggggagagaagccctctggacagcttctagagtgtgcaggttctcgtatccctcggccaagggtatcctctgcaaacctctgcaaacccagcgcaactacggtcccccggtcagacccaggatggggccagaacggacaggggccgcgccgctgccgctgctgctggtgttagcgctcagtcaaggcattttaaattgttgtttggcctacaatgttggtctcccagaagcaaaaatattttccggtccttcaagtgaacagtttggctatgcagtgcagcagtttataaatccaaaaggcaactggttactggttggttcaccctggagtggctttcctgagaaccgaatgggagatgtgtataaatgtcctgttgacctatccactgccacatgtgaaaaactaaatttgcaaacttcaacaagcattccaaatgttactgagatgaaaaccaacatgagcctcggcttgatcctcaccaggaacatgggaactggaggttttctcacatgtggtcctctgtgggcacagcaatgtgggaatcagtattacacaacgggtgtgtgttctgacatcagtcctgattttcagctctcagccagcttctcacctgcaactcagccctgcccttccctcatagatgttgtggttgtgtgtgatgaatcaaatagtatttatccttgggatgcagtaaagaattttttggaaaaatttgtacaaggcctggatataggccccacaaagacacaggtggggttaattcagtatgccaataatccaagagttgtgtttaacttgaacacatataaaaccaaagaagaaatgattgtagcaacatcccagacatcccaatatggtggggacctcacaaacacattcggagcaattcaatatgcaagaaaatatgcttattcagcagcttctggtgggcgacgaagtgctacgaaagtaatggtagttgtaactgacggtgaatcacatgatggttcaatgttgaaagctgtgattgatcaatgcaaccatgacaatatactgaggtttggcatagcagttcttgggtacttaaacagaaacgcccttgatactaaaaatttaataaaagaaataaaagcaatcgctagtattccaacagaaagatactttttcaatgtgtctgatgaagcagctctactagaaaaggctgggacattaggagaacaaattttcagcattgaaggtactgttcaaggaggagacaactttcagatggaaatgtcacaagtgggattcagtgcagattactcttctcaaaatgatattctgatgctgggtgcagtgggagcttttggctggagtgggaccattgtccagaagacatctcatggccatttgatctttcctaaacaagcctttgaccaaattctgcaggacagaaatcacagttcatatttaggttactctgtggctgcaatttctactggagaaagcactcactttgttgctggtgctcctcgggcaaattataccggccagatagtgctatatagtgtgaatgagaatggcaatatcacggttattcaggctcaccgaggtgaccagattggctcctattttggtagtgtgctgtgttcagttgatgtggataaagacaccattacagacgtgctcttggtaggtgcaccaatgtacatgagtgacctaaagaaagaggaaggaagagtctacctgtttactatcaaagagggcattttgggtcagcaccaatttcttgaaggccccgagggcattgaaaacactcgatttggttcagcaattgcagctctttcagacatcaacatggatggctttaatgatgtgattgttggttcaccactagaaaatcagaattctggagctgtatacatttacaatggtcatcagggcactatccgcacaaagtattcccagaaaatcttgggatccgatggagcctttaggagccatctccagtactttgggaggtccttggatggctatggagatttaaatggggattccatcaccgatgtgtctattggtgcctttggacaagtggttcaactctggtcacaaagtattgctgatgtagctatagaagcttcattcacaccagaaaaaatcactttggtcaacaagaatgctcagataattctcaaactctgcttcagtgcaaagttcagacctactaagcaaaacaatcaagtggccattgtatataacatcacacttgatgcagatggattttcatccagagtaacctccagggggttatttaaagaaaacaatgaaaggtgcctgcagaagaatatggtagtaaatcaagcacagagttgccccgagcacatcatttatatacaggagccctctgatgttgtcaactctttggatttgcgtgtggacatcagtctggaaaaccctggcactagccctgcccttgaagcctattctgagactgccaaggtcttcagtattcctttccacaaagactgtggtgaggacggactttgcatttctgatctagtcctagatgtccgacaaataccagctgctcaagaacaaccctttattgtcagcaaccaaaacaaaaggttaacattttcagtaacgctgaaaaataaaagggaaagtgcatacaacactggaattgttgttgatttttcagaaaacttgttttttgcatcattctccctgccggttgatgggacagaagtaacatgccaggtggctgcatctcagaagtctgttgcctgcgatgtaggctaccctgctttaaagagagaacaacaggtgacttttactattaactttgacttcaatcttcaaaaccttcagaatcaggcgtctctcagtttccaagccttaagtgaaagccaagaagaaaacaaggctgataatttggtcaacctcaaaattcctctcctgtatgatgctgaaattcacttaacaagatctaccaacataaatttttatgaaatctcttcggatgggaatgttccttcaatcgtgcacagttttgaagatgttggtccaaaattcatcttctccctgaaggtaacaacaggaagtgttccagtaagcatggcaactgtaatcatccacatccctcagtataccaaagaaaagaacccactgatgtacctaactggggtgcaaacagacaaggctggtgacatcagttgtaatgcagatatcaatccactgaaaataggacaaacatcttcttctgtatctttcaaaagtgaaaatttcaggcacaccaaagaattgaactgcagaactgcttcctgtagtaatgttacctgctggttgaaagacgttcacatgaaaggagaatactttgttaatgtgactaccagaatttggaacgggactttcgcatcatcaacgttccagacagtacagctaacggcagctgcagaaatcaacacctataaccctgagatatatgtgattgaagataacactgttacgattcccctgatgataatgaaacctgatgagaaagccgaagtaccaacaggagttataataggaagtataattgctggaatccttttgctgttagctctggttgcaattttatggaagctcggcttcttcaaaagaaaatatgaaaagatgaccaaaaatccagatgagattgatgagaccacagagctcagtagctgaaccagcagacctacctgcagtgggaaccggcagcatcccagccagggtttgctgtttgcgtgaatggatttctttttaaatcccatattttttttatcatgtcgtaggtaaactaacctggtattttaagagaaaactgcaggtcagtttggaatgaagaaattgtggggggtgggggaggtgcggggggcaggtagggaaataatagggaaaatacctattttatatgatgggggaaaaaaagtaatctttaaactggctggcccagagtttacattctaatttgcattgtgtcagaaacatgaaatgcttccaagcatgacaacttttaaagaaaaatatgatactctcagattttaagggggaaaactgttctctttaaaatatttgtctttaaacagcaactacagaagtggaagtgcttgatatgtaagtacttccacttgtgtatattttaatgaatattgatgttaacaagaggggaaaacaaaacacaggttttttcaatttatgctgctcatccaaagttgccacagatgatacttccaagtgataattttatttataaactaggtaaaatttgttgttggttccttttagaccacggctgccccttccacaccccatcttgctctaatgatcaaaacatgcttgaataactgagcttagagtatacctcctatatgtccatttaagttaggagagggggcgatatagagaataaggcacaaaattttgtttaaaactcagaatataacatgtaaaatcccatctgctagaagcccatcctgtgccagaggaaggaaaaggaggaaatttcctttctcttttaggaggcacaacagttctcttctaggatttgtttggctgactggcagtaacctagtgaatttctgaaagatgagtaatttctttggcaaccttcctcctcccttactgaaccactctcccacctcctggtggtaccattattatagaagccctctacagcctgactttctctccagcggtccaaagttatcccctcctttacccctcatccaaagttcccactccttcaggacagctgctgtgcattagatattaggggggaaagtcatctgtttaatttacacacttgcatgaattactgtatataaactccttaacttcagggagctattttcatttagtgctaaacaagtaagaaaaataagctcgagtgaatttctaaatgttggaatgttatgggatgtaaacaatgtaaagtaagacatctcaggatttcaccagaagttacagatgaggcactggaagccaccaaattagcaggtgcaccttctgtggctgtcttgtttctgaagtacttaaacttccacaagagtgaatttgacctaggcaagtttgttcaaaaggtagatcctgagatgatttggtcagattgggataaggcccagcaatctgcattttaacaagcaccccagtcactaggatgcagatggaccacactttgagaaacaccacccatttctactttttgcaccttattttctctgttcctgagcccccacattctctaggagaaacttagaggaaaagggcacagacactacatatctaaagctttggacaagtccttgacctctataaacttcagagtcctcattataaaatgggaagactgagctggagttcagcagtgatgcttttagttttaaaagtctatgatctggacttcctataatacaaatacacaatcctccaagaatttgacttggaaaaaaatgtcaaaggaaaacaggttatctgcccatgtgcatatggacaaccttgactaccctggcctggcccgtggtggcagtccagggctatctgtactgtttacagaattactttgtagttgacaacacaaaacaaacaaaaaaggcataaaatgccagcggtttatagaaaaaacagcatggtattctccagttaggtatgccagagtccaattcttttaacagctgtgagaatttgctgcttcattccaacaaaattttatttaaaaaaaaaaaaaaaagactggagaaactagtcattagcttgataaagaatatttaacagctagtggtgctggtgtgtacctgaagctccagctacttgagagactgagacaggaagatcgcttgagcccaggagttcaagtccagcctaagcaacatagcaagaccctgtctcaaaaaaatgactatttaaaaagacaatgtggccaggcacggtggctcacacctgtaatcccaacactttgggaggctgaggccggtggatcacgaggtcaggagtttgagactagcctggccaacatggtgaaaccccatctctaataatataaaaattagctgggcgtagtagcaggtgcctgtaatcccagttactcgggaagctgaggcaggagaatcacttgaacccgggaggcagaggtttcagtgagccgagatcgcgccactgcactccagcctgggtgacagggcaagactctgtctcaaacaaacaaacaaaaaaaaagttagtactgtatatgtaaatactagcttttcaatgtgctatacaaacaattatagcacatccttccttttactctgtctcacctcctttaggtgagtacttccttaaataagtgctaaacatacatatacggaacttgaaagctttggttagccttgccttaggtaatcagcctagtttacactgtttccagggagtagttgaattactataaaccattagccacttgtctctgcaccatttatcacaccaggacagggtctctcaacctgggcgctactgtcatttggggccaggtgattcttccttgcaggggctgtcctgtaccttgtaggacagcagccctgtcctagaaggtatgtttagcagcattcctggcctctagctacccgatgccagagcatgctccccccgcagtcatgacaatcaaaaaatgtctccagacattgtcaaatgcctcctggggggcagtatttctcaagcacttttaagcaaaggtaagtattcatacaagaaatttagggggaaaaaacattgtttaaataaaagctatgtgttcctattcaacaatatttttgctttaaaagtaagtagagggcataaaagatgtcatattcaaatttccatttcataaatggtgtacagacaaggtctatagaatgtggtaaaaacttgactgcaacacaaggcttataaaatagtaagatagtaaaatagcttatgaagaaactacagagatttaaaattgtgcatgactcatttcagcagcaaaataagaactcctaactgaacagaaatttttctacctagcaatgttattcttgtaaaatagttacctattaaaactgtgaagagtaaaactaaagccaatttattatagtcacacaagtgattatactaaaaattattataaaggttataattttataatgtatttacctgtcctgatatatagctataacccaatatatgaaaatctcaaaaattaagacatcatcatacagaaggcaggattccttaaactgagatccctgatccatctttaatatttcaatttgcacacataaaacaatgcccttttgtgtacattcaggcatacccattttaatcaatttgaaaggttaatttaaacctctagaggtgaatgagaaacatgggggaaaagtatgaaataggtgaaaatcttaactatttctttgaactctaaagactgaaactgtagccattatgtaaataaagtttcatatgtacctgtttattttggcagattaagtcaaaatatgaatgtatatattgcataactatgttagaattgtatatattttaaagaaattgtcttggatattttcctttatacataatagataagtcttttttcaaatgtggtgtttgatgtttttgattaaatgtgttttgcctctttccacaaaaactgtaaaaataaatgcatgtttgtacaaaaagttgcagaattcatttgatttatgagaaacaaaaattaaattgtagtcaacagttagtagtttttctcatatccaagtataacaaacagaaaagtttcattattgtaacccacttttttcataccacattattgaatattgttacaattgttttgaaaataaagccattttctttgggcttttataagttaaaaaaaaaa

SEQ ID NO: 146 - protein, 1181 aa, Homo sapiens
MGPERTGAAPLPLLLVLALSQGILNCCLAYNVGLPEAKIFSGPSSEQFGYAVQQFINPKGNWLLVGSPWSGFPENRMGDVYKCPVDLSTATCEKLNLQTSTSIPNVTEMKTNMSLGLILTRNMGTGGFLTCGPLWAQQCGNQYYTTGVCSDISPDFQLSASFSPATQPCPSLIDVVVVCDESNSIYPWDAVKNFLEKFVQGLDIGPTKTQVGLIQYANNPRVVFNLNTYKTKEEMIVATSQTSQYGGDLTNTFGAIQYARKYAYSAASGGRRSATKVMVVVTDGESHDGSMLKAVIDQCNHDNILRFGIAVLGYLNRNALDTKNLIKEIKAIASIPTERYFFNVSDEAALLEKAGTLGEQIFSIEGTVQGGDNFQMEMSQVGFSADYSSQNDILMLGAVGAFGWSGTIVQKTSHGHLIFPKQAFDQILQDRNHSSYLGYSVAAISTGESTHFVAGAPRANYTGQIVLYSVNENGNITVIQAHRGDQIGSYFGSVLCSVDVDKDTITDVLLVGAPMYMSDLKKEEGRVYLFTIKEGILGQHQFLEGPEGIENTRFGSAIAALSDINMDGFNDVIVGSPLENQNSGAVYIYNGHQGTIRTKYSQKILGSDGAFRSHLQYFGRSLDGYGDLNGDSITDVSIGAFGQVVQLWSQSIADVAIEASFTPEKITLVNKNAQIILKLCFSAKFRPTKQNNQVAIVYNITLDADGFSSRVTSRGLFKENNERCLQKNMVVNQAQSCPEHIIYIQEPSDVVNSLDLRVDISLENPGTSPALEAYSETAKVFSIPFHKDCGEDGLCISDLVLDVRQIPAAQEQPFIVSNQNKRLTFSVTLKNKRESAYNTGIVVDFSENLFFASFSLPVDGTEVTCQVAASQKSVACDVGYPALKREQQVTFTINFDFNLQNLQNQASLSFQALSESQEENKADNLVNLKIPLLYDAEIHLTRSTNINFYEISSDGNVPSIVHSFEDVGPKFIFSLKVTTGSVPVSMATVIIHIPQYTKEKNPLMYLTGVQTDKAGDISCNADINPLKIGQTSSSVSFKSENFRHTKELNCRTASCSNVTCWLKDVHMKGEYFVNVTTRIWNGTFASSTFQTVQLTAAAEINTYNPEIYVIEDNTVTIPLMIMKPDEKAEVPTGVIIGSIIAGILLLLALVAILWKLGFFKRKYEKMTKNPDEIDETTELSS

SEQ ID NO: 147 - DNA, 1911 bp, Homo sapiens
  CDS (322)..(1221)
cggggaagtgagagtcggggatcagtcctgcaagctacggagtcactacagggagaggtctcatcactagaaatagccgaagaacctgcagcctcaaccagcgttaaggaggacgtgccgtttctagggagtcttagtcggggctcaccagcttcctgcattttctgaccggctccaggaatagaaccaaaagaagctgaacaaggaagcagcgcggcaccaagaaaagcagaagtcggggccttggaggcgtgactttcccctcgggtccaggtagggcctggagctgctgcaagtgccgcctgtgctggggaagggaccatgtggctgccttgggctctgttgcttctctgggtcccaggatgttttgctctgagcaaatgcaggaccgtggcgggccccgtggggggatccctgagtgtgcagtgtccctatgagaaggaacacaggaccctcaacaaatactggtgcagaccaccacagattttcctatgtgacaagattgtggagaccaaagggtcagcaggaaaaaggaacggccgagtgtccatcagggacagtcctgcaaacctcagcttcacagtgaccctggagaatctcacagaggaggatgcaggcacctactggtgtggggtggatacaccatggctccgagactttcatgatcccgttgtcgaggttgaggtgtccgtgttcccggcatcaacgtcaatgacacctgcaagtatcactgcggccaagacctcaacaatcacaactgcatttccacctgtatcatccactaccctgtttgcagtgggtgccacccacagtgccagcatccaggaggaaactgaggaggtggtgaactcacagctcccgctgctcctctccctgctggcattgttgctgcttctgttggtgggggcctccctgctagcctggaggatgtttcagaaatggatcaaagctggtgaccattcagagctgtcccagaaccccaagcaggctgccacgcagagtgagctgcactacgcaaatctggagctgctgatgtggcctctgcaggaaaagccagcaccaccaagggaggtggaggtggaatacagcactgtggcctcccccagggaagaacttcactatgcctcggtggtgtttgattctaacaccaacaggatagctgctcagaggcctcgggaggaggaaccagattcagattacagtgtgataaggaagacataggcttttgtcctgcctcgccatcggagctctcatgggccccaggaagtccagggacagctcccttatacctggcccacgtccttctcagcctgccctcgacaacagtgaccaacagacaggcagctgggtttcccaggccatccctctgttgccatcagcttgattggcttccccgagggccagcagggctgggggctccggagagcagcaggaagcactcccagccaccagtgcctgtcacctctttcccctttgcccctgcttcatcccagctctgtgtgtggaggacaaagcttcttcctgcgtggctccaggaaaagatgtggctcacgtaggtggcacctgccaatagctttgtcaatcacagccccataggaacgtctggaattgcttgggagttggggagaactgtcaagaagagtgaagagagtgccaaagcggagatctgttcacctgggggccatggaggggggacccactaaagatcaagatcaaagattctccccatctcacagacaaggaaactgaggccagagggaggagagaattgctcatggctccagaactggtggcaagtttctctggactcttaggtttatttttaatatgaaatataaaaacagtttcaaatatcttattgagggagaagtaaaaacttatttaaacaaaaaaaaaaaaaaaaaaaaaaaa

SEQ ID NO: 148 - protein, 299 aa, Homo sapiens
MWLPWALLLLWVPGCFALSKCRTVAGPVGGSLSVQCPYEKEHRTLNKYWCRPPQIFLCDKIVETKGSAGKRNGRVSIRDSPANLSFTVTLENLTEEDAGTYWCGVDTPWLRDFHDPVVEVEVSVFPASTSMTPASITAAKTSTITTAFPPVSSTTLFAVGATHSASIQEETEEVVNSQLPLLLSLLALLLLLLVGASLLAWRMFQKWIKAGDHSELSQNPKQAATQSELHYANLELLMWPLQEKPAPPREVEVEYSTVASPREELHYASVVFDSNTNRIAAQRPREEEPDSDYSVIRKT

SEQ ID NO: 149 - DNA, 4811 bp, Homo sapiens
  CDS (53)..(3592)
ggtcctgccctgcgaaccagcgcggccccctggcgctgaggctgctccggccatggcccctcggccccgcgcccgcccaggggtcgctgtcgcctgctgctggctcctcactgttgttctacgctgctgcgtatcattcaatgttgatgtgaaaaattcaatgactttcagcggcccggtggaagacatgtttggatatactgttcaacaatatgaaaatgaagaaggaaaatgggtgcttattggttctccgttagttggccaacccaaaaacagaactggagatgtctataagtgtccagttgggagaggtgaatcattaccttgtgtaaagttggatctaccagttaatacatcaattcccaatgtcacagaagtaaaggagaacatgacatttggatcaactttagtcaccaacccaaatggaggatttctggcttgtgggcccttatatgcctatagatgtggacatttgcattacacaactggaatctgttctgacgtcagccccacatttcaagtcgtgaattccattgcccctgtacaagaatgcagcactcaactggacatagtcatagtgctggatggttccaacagtatttacccatgggacagtgttacagcttttttaaatgaccttcttgaaagaatggatattggtcctaaacagacacaggttggaattgtacagtatggagaaaacgtgacccatgagttcaacctcaataagtattcttccaccgaagaggtacttgttgcagcaaagaaaatagtccagagaggtggccgccagactatgacagctcttggaatagacacagcaagaaaggaggcattcacggaagcccggggtgcccgaagaggagttaaaaaagtcatggttattgtgacagatggagagtctcatgacaatcatcgactgaagaaggtcatccaagactgtgaagatgaaaacattcaacggttttccatagctattcttggcagctataaccgaggaaatttaagcactgaaaaatttgtggaggaaataaaatcaattgcaagtgaacccactgaaaagcatttcttcaatgtctctgatgaattggctctagtcaccattgttaaaactctgggagaaagaatatttgccctggaagccacagctgaccagtcagcagcttcatttgaaatggaaatgtctcagactggcttcagtgctcattattcacaggactgggtcatgcttggagcagtaggagcctatgattggaatggaacagttgtcatgcagaaggctagtcaaatcataatccctcgaaacacaacctttaatgttgagtctaccaaaaagaatgaaccgcttgcttcttatttaggttacactgtaaactctgctactgcttcttctggagatgtgctctatattgctggacagcctcggtacaatcatacaggccaggtcattatctacaggatggaagatggaaacatcaaaattctccagacgctcagtggagaacagattggttcctactttggcagtattttaacaacaactgacattgacaaggattctaatactgacattcttctagtcggagcccctatgtacatgggaacagagaaggaggagcaaggaaaagtgtatgtgtatgctctcaatcagacaaggtttgaatatcaaatgagcctggaacctattaagcagacgtgctgttcatctcggcagcacaattcatgcacaacagaaaacaaaaatgagccatgcggggctcgttttggaactgcaattgctgctgtaaaagacctcaatcttgatggatttaatgacatcgtgataggagctccgctggaagatgatcacgggggagctgtgtacatttatcatggaagtggcaagactataaggaaagagtatgcacaacgtattccatcaggtggggatggtaagacactgaaattttttggccagtctatccacggagaaatggatttaaatggtgacggtctgacagatgtgactattgggggccttggtggtgctgccctcttctggtcccgagatgtggccgtagttaaagtgaccatgaattttgagccaaataaagtgaatattcaaaagaaaaactgccatatggagggaaaggaaacagtatgcataaatgctacagtgtgttttgatgtgaaattaaagtctaaagaagacacgatttatgaagctgatttgcagtaccgtgtcaccctagattcactaagacaaatatcacgaagttttttctctggaactcaagagagaaaggttcaaaggaacatcacagttcgaaaatcagaatgcactaagcactccttctacatgttggacaagcatgactttcaggactctgtgagaataacgttggactttaatcttaccgatccagaaaatgggcctgttcttgatgattctctaccaaactcagtacatgaatatattccctttgccaaagattgtggaaataaggaaaaatgtatctcagacctcagcctgcatgtcgccaccactgaaaaggacctgctgattgtccgatcccagaatgataagttcaacgttagcctcacagtcaaaaatacaaaggacagtgcctataacaccaggacaatagtgcattattctccaaatctagttttttcaggaattgaggctatccaaaaagacagttgtgaatctaatcataatatcacatgtaaagttggatatcccttcctgagaagaggagagatggtaactttcaaaatattgtttcagtttaacacatcctatctcatggaaaatgtgaccatttatttaagtgcaacaagtgacagcgaagaacctcctgaaaccctttctgataatgtagtaaacatttctatcccggtaaaatatgaagttggactacagttttacagctctgcaagtgaataccacatttcaattgctgccaatgagacagtccctgaagttattaattctactgaggacattggaaatgaaattaatatcttctacttgattagaaaaagtggatcttttccaatgccagagcttaagctgtcaatttcattccccaatatgacatcaaatggttaccctgtgctgtacccaactggattgtcatcttctgagaatgcaaactgcagaccccatatctttgaggatcctttcagtatcaactctggaaagaaaatgactacatcaactgaccatctcaaacgaggcacaattctggactgcaatacatgtaaatttgctaccatcacatgtaatctcacttcttctgacatcagccaagtcaatgtttcgcttatcttgtggaaaccaacttttataaaatcatatttttccagcttaaatcttactataaggggagaacttcggagtgaaaatgcatctctggttttaagtagcagcaatcaaaaaagagagcttgctattcaaatatccaaagatgggctaccgggcagagtgccattatgggtcatcctgctgagtgcttttgccggattgttgctgttaatgctgctcattttagcactgtggaagattggattcttcaaaagaccactgaaaaagaaaatggagaaatgaaatattttatgaaagaaaataataacaattattcaataatctatcctcaggtttgcctcaaatatgtgacaagaaatgtataattcatgacatagtcatgtaactatgtaatccatcagggattcattacttggaaaatgacaggtcatgcattatccaaaaacaataccaaaaagacatattttataaaatgacaaaaaatattttacataattactcatttttgttgagtaagcaaaattacaaagtgtttttaaaaaaacctgtacaaatatgtttatgtattaaatcaccatccaaaatatttaaggaatatataaaaagatttttatgatcatagaaacatctattttcaaaacaatataaattaagcttttccccttgattcctgttggatatccatgttcagcatgacagtcagcactcgtaaatgccaagaaaagaattacctgaaaaagatcatttctccctattcaaatgagaatattttcccttggtagaatccatatacaatatggattgaaaattaagtcaccaagaatacatttagcatctttgtgttgggttctatacctaaaaattttccctccctgcccaaggtgattggaaagtactgcaattgagctaaaattttatctaggatggaaaatcaggatagactcgtttaaaaacaagtatattaaatgggttaaattaagcttttacagaacatgcttaattttgatattgagctctaaatgcaaaactcttttatactgaaaaaacacttaaagtagttttgtgtggcatcacagtgatttgtcatgaaaagccatatatgggggacatgctaaaatggcttctgaatgaaatacgacagcagagaaagatgccactgaaatgctgaaattatctttgctgagcagcttttgaatgctaagggttccagtatgtgacccaaagaaagagttgtctcaactccttggtacagggttcattcaaacccccaagctgtgagagtgtgtttatttttaattttttaaaaggtatttaatttccaaccacacttcttatttttttgaaaagacaattttccatttcagtattacattttaccaagaagtcactgctttttaggtgtgttgcatcaatatttaaataaaatcccagaaatgtattttaaagaatttcaggtttgaaaactcaaaccaacaggaagatatcaaaaaaaaaaaaaaaa

SEQ ID NO: 150 - protein, 1179 aa, Homo sapiens
MAPRPRARPGVAVACCWLLTVVLRCCVSFNVDVKNSMTFSGPVEDMFGYTVQQYENEEGKWVLIGSPLVGQPKNRTGDVYKCPVGRGESLPCVKLDLPVNTSIPNVTEVKENMTFGSTLVTNPNGGFLACGPLYAYRCGHLHYTTGICSDVSPTFQVVNSIAPVQECSTQLDIVIVLDGSNSIYPWDSVTAFLNDLLERMDIGPKQTQVGIVQYGENVTHEFNLNKYSSTEEVLVAAKKIVQRGGRQTMTALGIDTARKEAFTEARGARRGVKKVMVIVTDGESHDNHRLKKVIQDCEDENIQRFSIAILGSYNRGNLSTEKFVEEIKSIASEPTEKHFFNVSDELALVTIVKTLGERIFALEATADQSAASFEMEMSQTGFSAHYSQDWVMLGAVGAYDWNGTVVMQKASQIIIPRNTTFNVESTKKNEPLASYLGYTVNSATASSGDVLYIAGQPRYNHTGQVIIYRMEDGNIKILQTLSGEQIGSYFGSILTTTDIDKDSNTDILLVGAPMYMGTEKEEQGKVYVYALNQTRFEYQMSLEPIKQTCCSSRQHNSCTTENKNEPCGARFGTAIAAVKDLNLDGFNDIVIGAPLEDDHGGAVYIYHGSGKTIRKEYAQRIPSGGDGKTLKFFGQSIHGEMDLNGDGLTDVTIGGLGGAALFWSRDVAVVKVTMNFEPNKVNIQKKNCHMEGKETVCINATVCFDVKLKSKEDTIYEADLQYRVTLDSLRQISRSFFSGTQERKVQRNITVRKSECTKHSFYMLDKHDFQDSVRITLDFNLTDPENGPVLDDSLPNSVHEYIPFAKDCGNKEKCISDLSLHVATTEKDLLIVRSQNDKFNVSLTVKNTKDSAYNTRTIVHYSPNLVFSGIEAIQKDSCESNHNITCKVGYPFLRRGEMVTFKILFQFNTSYLMENVTIYLSATSDSEEPPETLSDNVVNISIPVKYEVGLQFYSSASEYHISIAANETVPEVINSTEDIGNEINIFYLIRKSGSFPMPELKLSISFPNMTSNGYPVLYPTGLSSSENANCRPHIFEDPFSINSGKKMTTSTDHLKRGTILDCNTCKFATITCNLTSSDISQVNVSLILWKPTFIKSYFSSLNLTIRGELRSENASLVLSSSNQKRELAIQISKDGLPGRVPLWVILLSAFAGLLLLMLLILALWKIGFFKRPLKKKMEK

SEQ ID NO: 151 - DNA, 1553 bp, Homo sapiens
  CDS (53)..(925)
cgaggctccgcaccagccgcgcttctgtccgcctgcagggcattccagaaagatgaggatatttgctgtctttatattcatgacctactggcatttgctgaacgcatttactgtcacggttcccaaggacctatatgtggtagagtatggtagcaatatgacaattgaatgcaaattcccagtagaaaaacaattagacctggctgcactaattgtctattgggaaatggaggataagaacattattcaatttgtgcatggagaggaagacctgaaggttcagcatagtagctacagacagagggcccggctgttgaaggaccagctctccctgggaaatgctgcacttcagatcacagatgtgaaattgcaggatgcaggggtgtaccgctgcatgatcagctatggtggtgccgactacaagcgaattactgtgaaagtcaatgccccatacaacaaaatcaaccaaagaattttggttgtggatccagtcacctctgaacatgaactgacatgtcaggctgagggctaccccaaggccgaagtcatctggacaagcagtgaccatcaagtcctgagtggtaagaccaccaccaccaattccaagagagaggagaagcttttcaatgtgaccagcacactgagaatcaacacaacaactaatgagattttctactgcacttttaggagattagatcctgaggaaaaccatacagctgaattggtcatcccagaactacctctggcacatcctccaaatgaaaggactcacttggtaattctgggagccatcttattatgccttggtgtagcactgacattcatcttccgtttaagaaaagggagaatgatggatgtgaaaaaatgtggcatccaagatacaaactcaaagaagcaaagtgatacacatttggaggagacgtaatccagcattggaacttctgatcttcaagcagggattctcaacctgtggtttaggggttcatcggggctgagcgtgacaagaggaaggaatgggcccgtgggatgcaggcaatgtgggacttaaaaggcccaagcactgaaaatggaacctggcgaaagcagaggaggagaatgaagaaagatggagtcaaacagggagcctggagggagaccttgatactttcaaatgcctgaggggctcatcgacgcctgtgacagggagaaaggatacttctgaacaaggagcctccaagcaaatcatccattgctcatcctaggaagacgggttgagaatccctaatttgagggtcagttcctgcagaagtgccctttgcctccactcaatgcctcaatttgttttctgcatgactgagagtctcagtgttggaacgggacagtatttatgtatgagtttttcctatttattttgagtctgtgaggtcttcttgtcatgtgagtgtggttgtgaatgatttcttttgaagatatattgtagtagatgttacaattttgtcgccaaactaaacttgctgcttaatgatttgctcacatctagtaaaacatggagtatttgtaaaaaaaaaaaaaaa

SEQ ID NO: 152 - protein, 290 aa, Homo sapiens
MRIFAVFIFMTYWHLLNAFTVTVPKDLYVVEYGSNMTIECKFPVEKQLDLAALIVYWEMEDKNIIQFVHGEEDLKVQHSSYRQRARLLKDQLSLGNAALQITDVKLQDAGVYRCMISYGGADYKRITVKVNAPYNKINQRILVVDPVTSEHELTCQAEGYPKAEVIWTSSDHQVLSGKTTTTNSKREEKLFNVTSTLRINTTTNEIFYCTFRRLDPEENHTAELVIPELPLAHPPNERTHLVILGAILLCLGVALTFIFRLRKGRMMDVKKCGIQDTNSKKQSDTHLEET

SEQ ID NO: 153 - DNA, 1246 bp, Homo sapiens
  CDS (112)..(798)
gaccagcctacagccgcctgcatctgtatccagcgccaggtcccgccagtcccagctgcgcgcgccccccagtcccgcacccgttcggcccaggctaagttagccctcaccatgccggtcaaaggaggcaccaagtgcatcaaatacctgctgttcggatttaacttcatcttctggcttgccgggattgctgtccttgccattggactatggctccgattcgactctcagaccaagagcatcttcgagcaagaaactaataataataattccagcttctacacaggagtctatattctgatcggagccggcgccctcatgatgctggtgggcttcctgggctgctgcggggctgtgcaggagtcccagtgcatgctgggactgttcttcggcttcctcttggtgatattcgccattgaaatagctgcggccatctggggatattcccacaaggatgaggtgattaaggaagtccaggagttttacaaggacacctacaacaagctgaaaaccaaggatgagccccagcgggaaacgctgaaagccatccactatgcgttgaactgctgtggtttggctgggggcgtggaacagtttatctcagacatctgccccaagaaggacgtactcgaaaccttcaccgtgaagtcctgtcctgatgccatcaaagaggtcttcgacaataaattccacatcatcggcgcagtgggcatcggcattgccgtggtcatgatatttggcatgatcttcagtatgatcttgtgctgtgctatccgcaggaaccgcgagatggtctagagtcagcttacatccctgagcaggaaagtttacccatgaagattggtgggattttttgtttgtttgttttgttttgtttgttgtttgttgtttgtttttttgccactaattttagtattcattctgcattgctagataaaagctgaagttactttatgtttgtcttttaatgcttcattcaatattgacatttgtagttgagcggggggtttggtttgctttggtttatattttttcagttgtttgtttttgcttgttatattaagcagaaatcctgcaatgaaaggtactatatttgctagactctagacaagatattgtacataaaagaatttttttgtctttaaatagatacaaatgtctatcaactttaatcaagttgtaacttatattgaagacaatttgatacataataaaaaattatgacaatgtcaaaaaaaaaaaaaaa

SEQ ID NO: 154 - protein, 228 aa, Homo sapiens
MPVKGGTKCIKYLLFGFNFIFWLAGIAVLAIGLWLRFDSQTKSIFEQETNNNNSSFYTGVYILIGAGALMMLVGFLGCCGAVQESQCMLGLFFGFLLVIFAIEIAAAIWGYSHKDEVIKEVQEFYKDTYNKLKTKDEPQRETLKAIHYALNCCGLAGGVEQFISDICPKKDVLETFTVKSCPDAIKEVFDNKFHIIGAVGIGIAVVMIFGMIFSMILCCAIRRNREMV

SEQ ID NO: 155 - DNA, 5672 bp, Homo sapiens
  CDS (316)..(2631)
aagcaccactgcagcagaccttgttaattttttttttttttctttccacacaacagttgtgcctcattatccggtgcctggctcggaatttttttttttttttttctttttggagggtttgaagtttctgtgcttcagtgactgttacagaagaagaggtgttagtgttgccatgaggtcttgattgtctgcatttatgaatgaaactgacctaaatcacctgttacctccagtttccagattgtttgaacttctctggccgcacaatacaggaaggaagactaaagcagcaaagggacctacagcgtctgcagcatgggctggttaactaggattgtctgtcttttctggggagtattacttacagcaagagcaaactatcagaatgggaagaacaatgtgccaaggctgaaattatcctacaaagaaatgttggaatccaacaatgtgatcactttcaatggcttggccaacagctccagttatcataccttccttttggatgaggaacggagtaggctgtatgttggagcaaaggatcacatattttcattcgacctggttaatatcaaggattttcaaaagattgtgtggccagtatcttacaccagaagagatgaatgcaagtgggctggaaaagacatcctgaaagaatgtgctaatttcatcaaggtacttaaggcatataatcagactcacttgtacgcctgtggaacgggggcttttcatccaatttgcacctacattgaaattggacatcatcctgaggacaatatttttaagctggagaactcacattttgaaaacggccgtgggaagagtccatatgaccctaagctgctgacagcatcccttttaatagatggagaattatactctggaactgcagctgattttatggggcgagactttgctatcttccgaactcttgggcaccaccacccaatcaggacagagcagcatgattccaggtggctcaatgatccaaagttcattagtgcccacctcatctcagagagtgacaatcctgaagatgacaaagtatactttttcttccgtgaaaatgcaatagatggagaacactctggaaaagctactcacgctagaataggtcagatatgcaagaatgactttggagggcacagaagtctggtgaataaatggacaacattcctcaaagctcgtctgatttgctcagtgccaggtccaaatggcattgacactcattttgatgaactgcaggatgtattcctaatgaactttaaagatcctaaaaatccagttgtatatggagtgtttacgacttccagtaacattttcaagggatcagccgtgtgtatgtatagcatgagtgatgtgagaagggtgttccttggtccatatgcccacagggatggacccaactatcaatgggtgccttatcaaggaagagtcccctatccacggccaggaacttgtcccagcaaaacatttggtggttttgactctacaaaggaccttcctgatgatgttataacctttgcaagaagtcatccagccatgtacaatccagtgtttcctatgaacaatcgcccaatagtgatcaaaacggatgtaaattatcaatttacacaaattgtcgtagaccgagtggatgcagaagatggacagtatgatgttatgtttatcggaacagatgttgggaccgttcttaaagtagtttcaattcctaaggagacttggtatgatttagaagaggttctgctggaagaaatgacagtttttcgggaaccgactgctatttcagcaatggagctttccactaagcagcaacaactatatattggttcaacggctggggttgcccagctccctttacaccggtgtgatatttacgggaaagcgtgtgctgagtgttgcctcgcccgagacccttactgtgcttgggatggttctgcatgttctcgctattttcccactgcaaagagacgcacaagacgacaagatataagaaatggagacccactgactcactgttcagacttacaccatgataatcaccatggccacagccctgaagagagaatcatctatggtgtagagaatagtagcacatttttggaatgcagtccgaagtcgcagagagcgctggtctattggcaattccagaggcgaaatgaagagcgaaaagaagagatcagagtggatgatcatatcatcaggacagatcaaggccttctgctacgtagtctacaacagaaggattcaggcaattacctctgccatgcggtggaacatgggttcatacaaactcttcttaaggtaaccctggaagtcattgacacagagcatttggaagaacttcttcataaagatgatgatggagatggctctaagaccaaagaaatgtccaatagcatgacacctagccagaaggtctggtacagagacttcatgcagctcatcaaccaccccaatctcaacacaatggatgagttctgtgaacaagtttggaaaagggaccgaaaacaacgtcggcaaaggccaggacataccccagggaacagtaacaaatggaagcacttacaagaaaataagaaaggtagaaacaggaggacccacgaatttgagagggcacccaggagtgtctgagctgcattacctctagaaacctcaaacaagtagaaacttgcctagacaataactggaaaaacaaatgcaatatacatgaacttttttcatggcattatgtggatgtttacaatggtgggaaattcagctgagttccaccaattataaattaaatccatgagtaactttcctaataggctttttttcctaataccaccacctaacagagaacacaggtgaatgcagatgttcactttagcagacttaatgtttcctatgagatttcactgtacaggtttgtctttcttctttgcctgagaaataaaaatgtcatttgccatattgccatctaaaggagaaaaactgcatcagcaaagccattgtattgaactaaaagtttaaaatgaactgcatggatttactaagctgatgaatattccaaaacgtggttggattcaaggatatattttgtctaccggccctcatgtttgtatgtacttgaggagtaaaatgagtaaaatgatactgaatgaaatgttctgtggaaatattaaaaaaaaaaaaaaacataagccatccatcatccagaagaaaaatggaatacactgatctactactgatgtcttctttcagctttgatctaaagatgtattttattaaaactataatttaaatgtaccatgaaaaatatgcagtaaaaattagttgttttctaagctagagtaggatttgtcttacaattattgtgctatgtagtttttgttttaaaaattccaatggtgtgctgctttctttggacattttattttcaattctataagagggatagatgacattgttctagaaacacatatacatcattaagagtgaatctctaaaaccaggatataaattatgctttatttctctgagaaaatcaaacaaatggaagctgttcacacctccccttctttaagcattatctaaattaatttttacttgcataatgttcttagaaaaaaaaacagaacatttaagcaggaaaaaaggaagaaacaagttgatttttaagtgcattttactataatgaatcaatgaagggaaaaggaactgcatatttcatgaaaataataagcattgtcttaatatactgttaatagaaaatgtgtcttaattccgtgcttgaatccctgcatgatatttgagactaagatctctcttatgattctaccaagaattatatctgtgtcacttaatttttttaaaagagagagatcaataactattcagagcaacatgttaaaggcaaagtttccaatcatttacatctgtatcaggtgcctcttacctttccttatttaagacaattatttgtacaagaaacacatgactcttttcatatcaatgggagggacttttctacaaagtattttccaggatgcaacccacatttaaacaatgtaaaattctttgtttcctgcaacaacttacaaaataaggtaaaagactaaaattcaagatttgcttccttcattgtcctaagacgattcgttgagaatcactgactttgagatatttaaaactttcagcattatactgtggtttcttttgcactgcactcacctattcaggactcctcccccaggttcctcatcatgcacaaaaatgcaaagaaaacatcttattagtaattaatgaagcaacattgaaattctaactctagctgtctttggattctaattaactcagcatcaatttctcacctcagactacagtgaatttttatttcctatcagctgaaatatttcacagatggaagctcatgtttcagttttaatgactgccttgaataaacaagttgttgccacttgtttcaaacaaaagcctaaaaataatctacattcaattttaggctccattgactaatatggtgttgcttttggaagtactgtatatcctcacatggaagccaaattgttaaattatttgaaggacacaccactgtacagaaagtagtgtttcaaatataaatcgaagaacaaagagtgctccaaaaaataggtcattcttttattttcataaagtatctaaactgtactaacattcagtgttgtgtttcattctaaatttgcagctgaaataaatttatttgcgatagcagaaatatcttattattcatcctcagaaataaaggatttgaagggatagagattatatgataaatttatagaagactttcagaatttgaatgcattttgtttagtgttatgaaatgacaatagaaaaaagtctcgacttcaattaaaagttacacaaacaaacaaatctacaggcatgtctttatataccatcaggtctaagttttcaaagaaaattgtagatataacttgcagataactcattacagtcataatctctgcccatgtgtattgagagggggcagtttgcacgaaaaagaattattggcccatttaataattcagctttaaatagactttgtcatatgcatgaatcatcagagatgaaactgtttgagagactcatgtgaccttacgaaaattacaacagcagtcttaaagtatgaaaaagatgcatcacagcagagacattatggcccagttgatatcaaatgtaaaatgtaaatgcatgtaaatgcacacttcattttatgtattatttagtaatttgcagtggtatgtgtttaatatttttgctacctacacattaggcaaaaaaaagatgtaaataatttgggagaaaaagaggaagaacagtgtaaaataaaactttctataagtactccatttcaatgtgttcaacatcatcctaaaaggcaagattttcccacgcaggtgacaaggtggtttatgtactatttaagggcggaaggtgcgtgcccgttcaataagcatgttttttgccaggtaggaaatatgttccatatctttacttatcattgcatttcagatgggaactagaaaaactggagagaaaaatgtaatgaaactgctgctgtaaattattccttttagcatgtattcacttgctaaatacacatttcttcaaaataaaaaaaaaaaaaa

SEQ ID NO: 156 - protein, 771 aa, Homo sapiens [sequence omitted]

SEQ ID NO: 157 - DNA, 6671 bp, Homo sapiens
  CDS (792)..(3587)
cagagatcgcgagcgaggcaccagcctgcagccggcccccagcacatcctcagccgcacagacactcggcgaggtggaggtgagggcgggcgccagcgaactcggagaggggctcgctcactcccaggcgatcccagccgccaccgccgccgcaccagcagcagcaacagcagcagcagcttccttcctcagactcccctcgagaggctggccaagcgggtgtagccgttgggggaggctcccgccgggggaacccggcgaggacaagagcagggcggccgccttccactcgggctgtccggcggcggctgcctccgcccgtgtgtccgtcaagggtgccgcgggatgtgtgtcagtttacgcctctgagatcacacagctgcctgggggccgtgtgatgcccaaggcaagtcttggttttaattattattattatcattattgttacgcttggctttcgggaaatactcgtgatatttgtaggataaaggaaatgacactttgaggaactggagagaacatatatgcgttttgtttttaagaggaaaaccgtgttctcttcccggcttgttccctctttgctgatttcaggagctactctcctcctggtgaggtggaaattccagcaagaatagaggtgaagacaagccaccaggactcaggagggaaacgctgaccattagaaacctctgcataagacgttgtaaggaggaaaataaaagagagaaaaacacaaagatttaaacaagaaacctacgaacccagctctggaaagagccaccttctccaaaatggatatgtttcctctcacctgggttttcttagccctctacttttcaagacaccaagtgagaggccaaccagacccaccgtgcggaggtcgtttgaattccaaagatgctggctatatcacctctcccggttacccccaggactacccctcccaccagaactgcgagtggattgtttacgcccccgaacccaaccagaagattgtcctcaacttcaaccctcactttgaaatcgagaagcacgactgcaagtatgactttatcgagattcgggatggggacagtgaatccgcagacctcctgggcaaacactgtgggaacatcgccccgcccaccatcatctcctcgggctccatgctctacatcaagttcacctccgactacgcccggcagggggcaggcttctctctgcgctacgagatcttcaagacaggctctgaagattgctcaaaaaacttcacaagccccaacgggaccatcgaatctcctgggtttcctgagaagtatccacacaacttggactgcacctttaccatcctggccaaacccaagatggagatcatcctgcagttcctgatctttgacctggagcatgaccctttgcaggtgggagagggggactgcaagtacgattggctggacatctgggatggcattccacatgttggccccctgattggcaagtactgtgggaccaaaacaccctctgaacttcgttcatcgacggggatcctctccctgacctttcacacggacatggcggtggccaaggatggcttctctgcgcgttactacctggtccaccaagagccactagagaactttcagtgcaatgttcctctgggcatggagtctggccggattgctaatgaacagatcagtgcctcatctacctactctgatgggaggtggacccctcaacaaagccggctccatggtgatgacaatggctggacccccaacttggattccaacaaggagtatctccaggtggacctgcgctttttaaccatgctcacggccatcgcaacacagggagcgatttccagggaaacacagaatggctactatgtcaaatcctacaagctggaagtcagcactaatggagaggactggatggtgtaccggcatggcaaaaaccacaaggtatttcaagccaacaacgatgcaactgaggtggttctgaacaagctccacgctccactgctgacaaggtttgttagaatccgccctcagacctggcactcaggtatcgccctccggctggagctcttcggctgccgggtcacagatgctccctgctccaacatgctggggatgctctcaggcctcattgcagactcccagatctccgcctcttccacccaggaatacctctggagccccagtgcagcccgcctggtcagcagccgctcgggctggttccctcgaatccctcaggcccagcccggtgaggagtggcttcaggtagatctgggaacacccaagacagtgaaaggtgtcatcatccagggagcccgcggaggagacagtatcactgctgtggaagccagagcatttgtgcgcaagttcaaagtctcctacagcctaaacggcaaggactgggaatacattcaggaccccaggacccagcagccaaagctgttcgaagggaacatgcactatgacacccctgacatccgaaggtttgaccccattccggcacagtatgtgcgggtatacccggagaggtggtcgccggcggggattgggatgcggctggaggtgctgggctgtgactggacagactccaagcccacggtagagacgctgggacccactgtgaagagcgaagagacaaccaccccctaccccaccgaagaggaggccacagagtgtggggagaactgcagctttgaggatgacaaagatttgcagctcccttcgggattcaattgcaacttcgatttcctcgaggagccctgtggttggatgtatgaccatgccaagtggctccggaccacctgggccagcagctccagcccaaacgaccggacgtttccagatgacaggaatttcttgcggctgcagagtgacagccagagagagggccagtatgcccggctcatcagcccccctgtccacctgccccgaagcccggtgtgcatggagttccagtaccaggccacgggcggccgcggggtggcgctgcaggtggtgcgggaagccagccaggagagcaagttgctgtgggtcatccgtgaggaccagggcggcgagtggaagcacgggcggatcatcctgcccagctacgacatggagtaccagattgtgttcgagggagtgatagggaaaggacgttccggagagattgccattgatgacattcggataagcactgatgtcccactggagaactgcatggaacccatctcggcttttgcaggtgagaattttaaagtggacatcccagaaatacatgagagagaaggatatgaagatgaaattgatgatgaatacgaggtggactggagcaattcttcttctgcaacctcagggtctggcgccccctcgaccgacaaagaaaagagctggctgtacaccctggatcccatcctcatcaccatcatcgccatgagctcactgggcgtcctcctgggggccacctgtgcaggcctcctgctctactgcacctgttcctactcgggcctgagctcccgaagctgcaccacactggagaactacaacttcgagctctacgatggccttaagcacaaggtcaagatgaaccaccaaaagtgctgctccgaggcatgacggattgcacctgaatcctatctgacgtttcattccagcaagaggggctggggaagattacatttttttttcctttggaaactgaatgccataatctcgatcaaaccgatccagaataccgaaggtatggacaggacagaaaagcgagtcgcaggaggaagggagatgcagccgcacaggggatgattaccctcctaggaccgcggtggctaagtcattgcaggaacggggctgtgttctctgctgggacaaaacaggagctcatctctttggggtcacagttctattttgtttgtgagtttgtattattattattattattattattattatattttatttctttggtctgtgagcaactcaaagaggcagaagaggagaatgacttttccagaatagaagtggagcagtgatcattattctccgctttctctttctaatcaacacttgaaaagcaaagtgtcttttcagcctttccatctttacaaataaaactcaaaaaagccgtccagcttatcccatcctctgattgtcttctgacttaagggatttactgtggtgtaggttctgccagccaaccctacaagctgccatttccagtcctagcatttaagtaggatgttgttgcctttaacttttcttatccaggggaaaattgccattttagggtcagcatgaacagctctttcttgtatgcgatttaaaacaaactggaaaggaaacttcacacgtcaaaatccatagaagcgcctggacgaggcttaaagtgctttgtgagtgaataggagccattcgctaattctagacccacagtgtctggtggtggggcttcccttgtggggcttctggtggtggttttgccttttcttttccctcctccatgttcttctaaaacatatacatatatacatacacacatacacatattcttcaggtctctaagcccctggaagcagcattgtgtgatattctcagaggcaggggaaaatagagggaaaaatagagactattggtatgttctccccatcagcgagttattgtaactggtcaccactggacgggaaggagaacagaggagagggaaagagaagcccaacctctgtgatcatatgagggccaaggctgagcagtgtagacagagaccctttgaaatgcatttgtctctcaaatagactagtaaacaccgacttctcctttgggttacaaacaccatttcaacctttcgggagagtcagagctaggatgtacaagaactgattctaaccagaagtccgcaagtactgtggacaagaatgcttaaccatgctgcttcagccttgagagacctaggttcttacacatatgcacacacgcatacacacatgcacgcacacacacatacacacatgcacgcacgcacgcatgcacaccaatttatgtttttattaagtgccttgaaaaaatgaagaaaaatgtattttccctttatgtaaaaattagtgaatatcttatgaattaaggcattcctctttccctaaccccgatggctccattcccaagtaccccaactcactgctgatcctattaaaggaatgagtcctgctacccgagtggtagtcatagccctagatgactctcaactactcttcaaagggaggcatcaggaatagaatgaaactgtgtgaaggataagattgttcgcatcaagatccaaatcttgatttcatattaacgcctaaggattgcctgtgtgctggaaatatatttgaaactcaaccagtatgcccagcctattgcatatcattgtcagaccatttttgctgctgtggtcacccacgatttcatttgtcttatacccaggtgaaaggggaagggtgaatgggactggctggttcctttaaatgttaacttatggaaatgctagttcaaatggtaatgtcacagtgttttgtatgcagagagcaagagttcaaccaacagctgtttattcatgtgtgtgtgtctttgctgctttgagttctctgtatctactgtgtatgtgaatggtcatgtgggactcagtggtggtgttgtgactttgacctagggtccgagtgtcacagctgatcttggcactcggcactcattggcacagtggtagttagaggtgaaaagtagagctgtcaagcccaagggcttagctttagggctcctcctgagttcggcccacagtagaagcaagattttaactagccccttttcctcttcaccctcccatgatgcgcagtgttcagaaagctggtaagtcctagggatttccagaagtagcctgcagaagaaggtaagtttgaaagccactccaggggtcctgatgctgtcatgctcagtgagccattttacagttctccaaagtctagccctgtttcggacctgcacttcacctctaagttatgtacaactcaacctgcatccctctaaaagtcctatatccatattcaccattggctaatttgaggccctgagtgggccttgaatgctaaaaagaagcagggtacgcagggctacatgtagataccacaccaaggctggaggctggtctgtcataagacagaaagaaagacgctgggcccaattttgacttggccaggggacaccttggtgtgtttgttatctttatctgtgggtaggctagctgacccatctccttgagtcattccctttgggaaaccccactgccagtattgatctcctttttgccttgtactgaatgacacattacctccacactctcccggactaggtggtcaacagggccacagggttgctttctgtctttggtggggcaggggagttgacagggatgagggtccaaggaataagcatgaatgacaagaaaacaagggaaagagttaacctgtcacatagcaggttaactttttcagggtttgcagttagaggtattcgaccattcactggctgagccagatcacgggaacttgagagcttttactgtgattcttcaatgtaaaaaataaacaacaatgtcaaactgtgtttatatgatttgtataaagcctttttaagattactatttaaataaacattataccagagataaaaaaaaaa

SEQ ID NO: 158 - protein, 931 aa, Homo sapiens
MDMFPLTWVFLALYFSRHQVRGQPDPPCGGRLNSKDAGYITSPGYPQDYPSHQNCEWIVYAPEPNQKIVLNFNPHFEIEKHDCKYDFIEIRDGDSESADLLGKHCGNIAPPTIISSGSMLYIKFTSDYARQGAGFSLRYEIFKTGSEDCSKNFTSPNGTIESPGFPEKYPHNLDCTFTILAKPKMEIILQFLIFDLEHDPLQVGEGDCKYDWLDIWDGIPHVGPLIGKYCGTKTPSELRSSTGILSLTFHTDMAVAKDGFSARYYLVHQEPLENFQCNVPLGMESGRIANEQISASSTYSDGRWTPQQSRLHGDDNGWTPNLDSNKEYLQVDLRFLTMLTAIATQGAISRETQNGYYVKSYKLEVSTNGEDWMVYRHGKNHKVFQANNDATEVVLNKLHAPLLTRFVRIRPQTWHSGIALRLELFGCRVTDAPCSNMLGMLSGLIADSQISASSTQEYLWSPSAARLVSSRSGWFPRIPQAQPGEEWLQVDLGTPKTVKGVIIQGARGGDSITAVEARAFVRKFKVSYSLNGKDWEYIQDPRTQQPKLFEGNMHYDTPDIRRFDPIPAQYVRVYPERWSPAGIGMRLEVLGCDWTDSKPTVETLGPTVKSEETTTPYPTEEEATECGENCSFEDDKDLQLPSGFNCNFDFLEEPCGWMYDHAKWLRTTWASSSSPNDRTFPDDRNFLRLQSDSQREGQYARLISPPVHLPRSPVCMEFQYQATGGRGVALQVVREASQESKLLWVIREDQGGEWKHGRIILPSYDMEYQIVFEGVIGKGRSGEIAIDDIRISTDVPLENCMEPISAFAGENFKVDIPEIHEREGYEDEIDDEYEVDWSNSSSATSGSGAPSTDKEKSWLYTLDPILITIIAMSSLGVLLGATCAGLLLYCTCSYSGLSSRSCTTLENYNFELYDGLKHKVKMNHQKCCSEA

SEQ ID NO: 159 - DNA, 6656 bp, Homo sapiens
  CDS (792)..(3572)
cagagatcgcgagcgaggcaccagcctgcagccggcccccagcacatcctcagccgcacagacactcggcgaggtggaggtgagggcgggcgccagcgaactcggagaggggctcgctcactcccaggcgatcccagccgccaccgccgccgcaccagcagcagcaacagcagcagcagcttccttcctcagactcccctcgagaggctggccaagcgggtgtagccgttgggggaggctcccgccgggggaacccggcgaggacaagagcagggcggccgccttccactcgggctgtccggcggcggctgcctccgcccgtgtgtccgtcaagggtgccgcgggatgtgtgtcagtttacgcctctgagatcacacagctgcctgggggccgtgtgatgcccaaggcaagtcttggttttaattattattattatcattattgttacgcttggctttcgggaaatactcgtgatatttgtaggataaaggaaatgacactttgaggaactggagagaacatatatgcgttttgtttttaagaggaaaaccgtgttctcttcccggcttgttccctctttgctgatttcaggagctactctcctcctggtgaggtggaaattccagcaagaatagaggtgaagacaagccaccaggactcaggagggaaacgctgaccattagaaacctctgcataagacgttgtaaggaggaaaataaaagagagaaaaacacaaagatttaaacaagaaacctacgaacccagctctggaaagagccaccttctccaaaatggatatgtttcctctcacctgggttttcttagccctctacttttcaagacaccaagtgagaggccaaccagacccaccgtgcggaggtcgtttgaattccaaagatgctggctatatcacctctcccggttacccccaggactacccctcccaccagaactgcgagtggattgtttacgcccccgaacccaaccagaagattgtcctcaacttcaaccctcactttgaaatcgagaagcacgactgcaagtatgactttatcgagattcgggatggggacagtgaatccgcagacctcctgggcaaacactgtgggaacatcgccccgcccaccatcatctcctcgggctccatgctctacatcaagttcacctccgactacgcccggcagggggcaggcttctctctgcgctacgagatcttcaagacaggctctgaagattgctcaaaaaacttcacaagccccaacgggaccatcgaatctcctgggtttcctgagaagtatccacacaacttggactgcacctttaccatcctggccaaacccaagatggagatcatcctgcagttcctgatctttgacctggagcatgaccctttgcaggtgggagagggggactgcaagtacgattggctggacatctgggatggcattccacatgttggccccctgattggcaagtactgtgggaccaaaacaccctctgaacttcgttcatcgacggggatcctctccctgacctttcacacggacatggcggtggccaaggatggcttctctgcgcgttactacctggtccaccaagagccactagagaactttcagtgcaatgttcctctgggcatggagtctggccggattgctaatgaacagatcagtgcctcatctacctactctgatgggaggtggacccctcaacaaagccggctccatggtgatgacaatggctggacccccaacttggattccaacaaggagtatctccaggtggacctgcgctttttaaccatgctcacggccatcgcaacacagggagcgatttccagggaaacacagaatggctactatgtcaaatcctacaagctggaagtcagcactaatggagaggactggatggtgtaccggcatggcaaaaaccacaaggtatttcaagccaacaacgatgcaactgaggtggttctgaacaagctccacgctccactgctgacaaggtttgttagaatccgccctcagacctggcactcaggtatcgccctccggctggagctcttcggctgccgggtcacagatgctccctgctccaacatgctggggatgctctcaggcctcattgcagactcccagatctccgcctcttccacccaggaatacctctggagccccagtgcagcccgcctggtcagcagccgctcgggctggttccctcgaatccctcaggcccagcccggtgaggagtggcttcaggtagatctgggaacacccaagacagtgaaaggtgtcatcatccagggagcccgcggaggagacagtatcactgctgtggaagccagagcatttgtgcgcaagttcaaagtctcctacagcctaaacggcaaggactgggaatacattcaggaccccaggacccagcagccaaagctgttcgaagggaacatgcactatgacacccctgacatccgaaggtttgaccccattccggcacagtatgtgcgggtatacccggagaggtggtcgccggcggggattgggatgcggctggaggtgctgggctgtgactggacagactccaagcccacggtagagacgctgggacccactgtgaagagcgaagagacaaccaccccctaccccaccgaagaggaggccacagagtgtggggagaactgcagctttgaggatgacaaagatttgcagctcccttcgggattcaattgcaacttcgatttcctcgaggagccctgtggttggatgtatgaccatgccaagtggctccggaccacctgggccagcagctccagcccaaacgaccggacgtttccagatgacaggaatttcttgcggctgcagagtgacagccagagagagggccagtatgcccggctcatcagcccccctgtccacctgccccgaagcccggtgtgcatggagttccagtaccaggccacgggcggccgcggggtggcgctgcaggtggtgcgggaagccagccaggagagcaagttgctgtgggtcatccgtgaggaccagggcggcgagtggaagcacgggcggatcatcctgcccagctacgacatggagtaccagattgtgttcgagggagtgatagggaaaggacgttccggagagattgccattgatgacattcggataagcactgatgtcccactggagaactgcatggaacccatctcggcttttgcagtggacatcccagaaatacatgagagagaaggatatgaagatgaaattgatgatgaatacgaggtggactggagcaattcttcttctgcaacctcagggtctggcgccccctcgaccgacaaagaaaagagctggctgtacaccctggatcccatcctcatcaccatcatcgccatgagctcactgggcgtcctcctgggggccacctgtgcaggcctcctgctctactgcacctgttcctactcgggcctgagctcccgaagctgcaccacactggagaactacaacttcgagctctacgatggccttaagcacaaggtcaagatgaaccaccaaaagtgctgctccgaggcatgacggattgcacctgaatcctatctgacgtttcattccagcaagaggggctggggaagattacatttttttttcctttggaaactgaatgccataatctcgatcaaaccgatccagaataccgaaggtatggacaggacagaaaagcgagtcgcaggaggaagggagatgcagccgcacaggggatgattaccctcctaggaccgcggtggctaagtcattgcaggaacggggctgtgttctctgctgggacaaaacaggagctcatctctttggggtcacagttctattttgtttgtgagtttgtattattattattattattattattattatattttatttctttggtctgtgagcaactcaaagaggcagaagaggagaatgacttttccagaatagaagtggagcagtgatcattattctccgctttctctttctaatcaacacttgaaaagcaaagtgtcttttcagcctttccatctttacaaataaaactcaaaaaagccgtccagcttatcccatcctctgattgtcttctgacttaagggatttactgtggtgtaggttctgccagccaaccctacaagctgccatttccagtcctagcatttaagtaggatgttgttgcctttaacttttcttatccaggggaaaattgccattttagggtcagcatgaacagctctttcttgtatgcgatttaaaacaaactggaaaggaaacttcacacgtcaaaatccatagaagcgcctggacgaggcttaaagtgctttgtgagtgaataggagccattcgctaattctagacccacagtgtctggtggtggggcttcccttgtggggcttctggtggtggttttgccttttcttttccctcctccatgttcttctaaaacatatacatatatacatacacacatacacatattcttcaggtctctaagcccctggaagcagcattgtgtgatattctcagaggcaggggaaaatagagggaaaaatagagactattggtatgttctccccatcagcgagttattgtaactggtcaccactggacgggaaggagaacagaggagagggaaagagaagcccaacctctgtgatcatatgagggccaaggctgagcagtgtagacagagaccctttgaaatgcatttgtctctcaaatagactagtaaacaccgacttctcctttgggttacaaacaccatttcaacctttcgggagagtcagagctaggatgtacaagaactgattctaaccagaagtccgcaagtactgtggacaagaatgcttaaccatgctgcttcagccttgagagacctaggttcttacacatatgcacacacgcatacacacatgcacgcacacacacatacacacatgcacgcacgcacgcatgcacaccaatttatgtttttattaagtgccttgaaaaaatgaagaaaaatgtattttccctttatgtaaaaattagtgaatatcttatgaattaaggcattcctctttccctaaccccgatggctccattcccaagtaccccaactcactgctgatcctattaaaggaatgagtcctgctacccgagtggtagtcatagccctagatgactctcaactactcttcaaagggaggcatcaggaatagaatgaaactgtgtgaaggataagattgttcgcatcaagatccaaatcttgatttcatattaacgcctaaggattgcctgtgtgctggaaatatatttgaaactcaaccagtatgcccagcctattgcatatcattgtcagaccatttttgctgctgtggtcacccacgatttcatttgtcttatacccaggtgaaaggggaagggtgaatgggactggctggttcctttaaatgttaacttatggaaatgctagttcaaatggtaatgtcacagtgttttgtatgcagagagcaagagttcaaccaacagctgtttattcatgtgtgtgtgtctttgctgctttgagttctctgtatctactgtgtatgtgaatggtcatgtgggactcagtggtggtgttgtgactttgacctagggtccgagtgtcacagctgatcttggcactcggcactcattggcacagtggtagttagaggtgaaaagtagagctgtcaagcccaagggcttagctttagggctcctcctgagttcggcccacagtagaagcaagattttaactagccccttttcctcttcaccctcccatgatgcgcagtgttcagaaagctggtaagtcctagggatttccagaagtagcctgcagaagaaggtaagtttgaaagccactccaggggtcctgatgctgtcatgctcagtgagccattttacagttctccaaagtctagccctgtttcggacctgcacttcacctctaagttatgtacaactcaacctgcatccctctaaaagtcctatatccatattcaccattggctaatttgaggccctgagtgggccttgaatgctaaaaagaagcagggtacgcagggctacatgtagataccacaccaaggctggaggctggtctgtcataagacagaaagaaagacgctgggcccaattttgacttggccaggggacaccttggtgtgtttgttatctttatctgtgggtaggctagctgacccatctccttgagtcattccctttgggaaaccccactgccagtattgatctcctttttgccttgtactgaatgacacattacctccacactctcccggactaggtggtcaacagggccacagggttgctttctgtctttggtggggcaggggagttgacagggatgagggtccaaggaataagcatgaatgacaagaaaacaagggaaagagttaacctgtcacatagcaggttaactttttcagggtttgcagttagaggtattcgaccattcactggctgagccagatcacgggaacttgagagcttttactgtgattcttcaatgtaaaaaataaacaacaatgtcaaactgtgtttatatgatttgtataaagcctttttaagattactatttaaataaacattataccagagataaaaaaaaaa

SEQ ID NO: 160 - protein, 926 aa, Homo sapiens
MDMFPLTWVFLALYFSRHQVRGQPDPPCGGRLNSKDAGYITSPGYPQDYPSHQNCEWIVYAPEPNQKIVLNFNPHFEIEKHDCKYDFIEIRDGDSESADLLGKHCGNIAPPTIISSGSMLYIKFTSDYARQGAGFSLRYEIFKTGSEDCSKNFTSPNGTIESPGFPEKYPHNLDCTFTILAKPKMEIILQFLIFDLEHDPLQVGEGDCKYDWLDIWDGIPHVGPLIGKYCGTKTPSELRSSTGILSLTFHTDMAVAKDGFSARYYLVHQEPLENFQCNVPLGMESGRIANEQISASSTYSDGRWTPQQSRLHGDDNGWTPNLDSNKEYLQVDLRFLTMLTAIATQGAISRETQNGYYVKSYKLEVSTNGEDWMVYRHGKNHKVFQANNDATEVVLNKLHAPLLTRFVRIRPQTWHSGIALRLELFGCRVTDAPCSNMLGMLSGLIADSQISASSTQEYLWSPSAARLVSSRSGWFPRIPQAQPGEEWLQVDLGTPKTVKGVIIQGARGGDSITAVEARAFVRKFKVSYSLNGKDWEYIQDPRTQQPKLFEGNMHYDTPDIRRFDPIPAQYVRVYPERWSPAGIGMRLEVLGCDWTDSKPTVETLGPTVKSEETTTPYPTEEEATECGENCSFEDDKDLQLPSGFNCNFDFLEEPCGWMYDHAKWLRTTWASSSSPNDRTFPDDRNFLRLQSDSQREGQYARLISPPVHLPRSPVCMEFQYQATGGRGVALQVVREASQESKLLWVIREDQGGEWKHGRIILPSYDMEYQIVFEGVIGKGRSGEIAIDDIRISTDVPLENCMEPISAFAVDIPEIHEREGYEDEIDDEYEVDWSNSSSATSGSGAPSTDKEKSWLYTLDPILITIIAMSSLGVLLGATCAGLLLYCTCSYSGLSSRSCTTLENYNFELYDGLKHKVKMNHQKCCSEA

SEQ ID NO: 161 - DNA, 6605 bp, Homo sapiens
  CDS (792)..(3521)
cagagatcgcgagcgaggcaccagcctgcagccggcccccagcacatcctcagccgcacagacactcggcgaggtggaggtgagggcgggcgccagcgaactcggagaggggctcgctcactcccaggcgatcccagccgccaccgccgccgcaccagcagcagcaacagcagcagcagcttccttcctcagactcccctcgagaggctggccaagcgggtgtagccgttgggggaggctcccgccgggggaacccggcgaggacaagagcagggcggccgccttccactcgggctgtccggcggcggctgcctccgcccgtgtgtccgtcaagggtgccgcgggatgtgtgtcagtttacgcctctgagatcacacagctgcctgggggccgtgtgatgcccaaggcaagtcttggttttaattattattattatcattattgttacgcttggctttcgggaaatactcgtgatatttgtaggataaaggaaatgacactttgaggaactggagagaacatatatgcgttttgtttttaagaggaaaaccgtgttctcttcccggcttgttccctctttgctgatttcaggagctactctcctcctggtgaggtggaaattccagcaagaatagaggtgaagacaagccaccaggactcaggagggaaacgctgaccattagaaacctctgcataagacgttgtaaggaggaaaataaaagagagaaaaacacaaagatttaaacaagaaacctacgaacccagctctggaaagagccaccttctccaaaatggatatgtttcctctcacctgggttttcttagccctctacttttcaagacaccaagtgagaggccaaccagacccaccgtgcggaggtcgtttgaattccaaagatgctggctatatcacctctcccggttacccccaggactacccctcccaccagaactgcgagtggattgtttacgcccccgaacccaaccagaagattgtcctcaacttcaaccctcactttgaaatcgagaagcacgactgcaagtatgactttatcgagattcgggatggggacagtgaatccgcagacctcctgggcaaacactgtgggaacatcgccccgcccaccatcatctcctcgggctccatgctctacatcaagttcacctccgactacgcccggcagggggcaggcttctctctgcgctacgagatcttcaagacaggctctgaagattgctcaaaaaacttcacaagccccaacgggaccatcgaatctcctgggtttcctgagaagtatccacacaacttggactgcacctttaccatcctggccaaacccaagatggagatcatcctgcagttcctgatctttgacctggagcatgaccctttgcaggtgggagagggggactgcaagtacgattggctggacatctgggatggcattccacatgttggccccctgattggcaagtactgtgggaccaaaacaccctctgaacttcgttcatcgacggggatcctctccctgacctttcacacggacatggcggtggccaaggatggcttctctgcgcgttactacctggtccaccaagagccactagagaactttcagtgcaatgttcctctgggcatggagtctggccggattgctaatgaacagatcagtgcctcatctacctactctgatgggaggtggacccctcaacaaagccggctccatggtgatgacaatggctggacccccaacttggattccaacaaggagtatctccaggtggacctgcgctttttaaccatgctcacggccatcgcaacacagggagcgatttccagggaaacacagaatggctactatgtcaaatcctacaagctggaagtcagcactaatggagaggactggatggtgtaccggcatggcaaaaaccacaaggtatttcaagccaacaacgatgcaactgaggtggttctgaacaagctccacgctccactgctgacaaggtttgttagaatccgccctcagacctggcactcaggtatcgccctccggctggagctcttcggctgccgggtcacagatgctccctgctccaacatgctggggatgctctcaggcctcattgcagactcccagatctccgcctcttccacccaggaatacctctggagccccagtgcagcccgcctggtcagcagccgctcgggctggttccctcgaatccctcaggcccagcccggtgaggagtggcttcaggtagatctgggaacacccaagacagtgaaaggtgtcatcatccagggagcccgcggaggagacagtatcactgctgtggaagccagagcatttgtgcgcaagttcaaagtctcctacagcctaaacggcaaggactgggaatacattcaggaccccaggacccagcagccaaagctgttcgaagggaacatgcactatgacacccctgacatccgaaggtttgaccccattccggcacagtatgtgcgggtatacccggagaggtggtcgccggcggggattgggatgcggctggaggtgctgggctgtgactggacagactccaagcccacggtagagacgctgggacccactgtgaagagcgaagagacaaccaccccctaccccaccgaagaggaggccacagagtgtggggagaactgcagctttgaggatgacaaagatttgcagctcccttcgggattcaattgcaacttcgatttcctcgaggagccctgtggttggatgtatgaccatgccaagtggctccggaccacctgggccagcagctccagcccaaacgaccggacgtttccagatgacaggaatttcttgcggctgcagagtgacagccagagagagggccagtatgcccggctcatcagcccccctgtccacctgccccgaagcccggtgtgcatggagttccagtaccaggccacgggcggccgcggggtggcgctgcaggtggtgcgggaagccagccaggagagcaagttgctgtgggtcatccgtgaggaccagggcggcgagtggaagcacgggcggatcatcctgcccagctacgacatggagtaccagattgtgttcgagggagtgatagggaaaggacgttccggagagattgccattgatgacattcggataagcactgatgtcccactggagaactgcatggaacccatctcggcttttgcagatgaatacgaggtggactggagcaattcttcttctgcaacctcagggtctggcgccccctcgaccgacaaagaaaagagctggctgtacaccctggatcccatcctcatcaccatcatcgccatgagctcactgggcgtcctcctgggggccacctgtgcaggcctcctgctctactgcacctgttcctactcgggcctgagctcccgaagctgcaccacactggagaactacaacttcgagctctacgatggccttaagcacaaggtcaagatgaaccaccaaaagtgctgctccgaggcatgacggattgcacctgaatcctatctgacgtttcattccagcaagaggggctggggaagattacatttttttttcctttggaaactgaatgccataatctcgatcaaaccgatccagaataccgaaggtatggacaggacagaaaagcgagtcgcaggaggaagggagatgcagccgcacaggggatgattaccctcctaggaccgcggtggctaagtcattgcaggaacggggctgtgttctctgctgggacaaaacaggagctcatctctttggggtcacagttctattttgtttgtgagtttgtattattattattattattattattattatattttatttctttggtctgtgagcaactcaaagaggcagaagaggagaatgacttttccagaatagaagtggagcagtgatcattattctccgctttctctttctaatcaacacttgaaaagcaaagtgtcttttcagcctttccatctttacaaataaaactcaaaaaagccgtccagcttatcccatcctctgattgtcttctgacttaagggatttactgtggtgtaggttctgccagccaaccctacaagctgccatttccagtcctagcatttaagtaggatgttgttgcctttaacttttcttatccaggggaaaattgccattttagggtcagcatgaacagctctttcttgtatgcgatttaaaacaaactggaaaggaaacttcacacgtcaaaatccatagaagcgcctggacgaggcttaaagtgctttgtgagtgaataggagccattcgctaattctagacccacagtgtctggtggtggggcttcccttgtggggcttctggtggtggttttgccttttcttttccctcctccatgttcttctaaaacatatacatatatacatacacacatacacatattcttcaggtctctaagcccctggaagcagcattgtgtgatattctcagaggcaggggaaaatagagggaaaaatagagactattggtatgttctccccatcagcgagttattgtaactggtcaccactggacgggaaggagaacagaggagagggaaagagaagcccaacctctgtgatcatatgagggccaaggctgagcagtgtagacagagaccctttgaaatgcatttgtctctcaaatagactagtaaacaccgacttctcctttgggttacaaacaccatttcaacctttcgggagagtcagagctaggatgtacaagaactgattctaaccagaagtccgcaagtactgtggacaagaatgcttaaccatgctgcttcagccttgagagacctaggttcttacacatatgcacacacgcatacacacatgcacgcacacacacatacacacatgcacgcacgcacgcatgcacaccaatttatgtttttattaagtgccttgaaaaaatgaagaaaaatgtattttccctttatgtaaaaattagtgaatatcttatgaattaaggcattcctctttccctaaccccgatggctccattcccaagtaccccaactcactgctgatcctattaaaggaatgagtcctgctacccgagtggtagtcatagccctagatgactctcaactactcttcaaagggaggcatcaggaatagaatgaaactgtgtgaaggataagattgttcgcatcaagatccaaatcttgatttcatattaacgcctaaggattgcctgtgtgctggaaatatatttgaaactcaaccagtatgcccagcctattgcatatcattgtcagaccatttttgctgctgtggtcacccacgatttcatttgtcttatacccaggtgaaaggggaagggtgaatgggactggctggttcctttaaatgttaacttatggaaatgctagttcaaatggtaatgtcacagtgttttgtatgcagagagcaagagttcaaccaacagctgtttattcatgtgtgtgtgtctttgctgctttgagttctctgtatctactgtgtatgtgaatggtcatgtgggactcagtggtggtgttgtgactttgacctagggtccgagtgtcacagctgatcttggcactcggcactcattggcacagtggtagttagaggtgaaaagtagagctgtcaagcccaagggcttagctttagggctcctcctgagttcggcccacagtagaagcaagattttaactagccccttttcctcttcaccctcccatgatgcgcagtgttcagaaagctggtaagtcctagggatttccagaagtagcctgcagaagaaggtaagtttgaaagccactccaggggtcctgatgctgtcatgctcagtgagccattttacagttctccaaagtctagccctgtttcggacctgcacttcacctctaagttatgtacaactcaacctgcatccctctaaaagtcctatatccatattcaccattggctaatttgaggccctgagtgggccttgaatgctaaaaagaagcagggtacgcagggctacatgtagataccacaccaaggctggaggctggtctgtcataagacagaaagaaagacgctgggcccaattttgacttggccaggggacaccttggtgtgtttgttatctttatctgtgggtaggctagctgacccatctccttgagtcattccctttgggaaaccccactgccagtattgatctcctttttgccttgtactgaatgacacattacctccacactctcccggactaggtggtcaacagggccacagggttgctttctgtctttggtggggcaggggagttgacagggatgagggtccaaggaataagcatgaatgacaagaaaacaagggaaagagttaacctgtcacatagcaggttaactttttcagggtttgcagttagaggtattcgaccattcactggctgagccagatcacgggaacttgagagcttttactgtgattcttcaatgtaaaaaataaacaacaatgtcaaactgtgtttatatgatttgtataaagcctttttaagattactatttaaataaacattataccagagataaaaaaaaaa

SEQ ID NO: 162 - protein, 909 aa, Homo sapiens
MDMFPLTWVFLALYFSRHQVRGQPDPPCGGRLNSKDAGYITSPGYPQDYPSHQNCEWIVYAPEPNQKIVLNFNPHFEIEKHDCKYDFIEIRDGDSESADLLGKHCGNIAPPTIISSGSMLYIKFTSDYARQGAGFSLRYEIFKTGSEDCSKNFTSPNGTIESPGFPEKYPHNLDCTFTILAKPKMEIILQFLIFDLEHDPLQVGEGDCKYDWLDIWDGIPHVGPLIGKYCGTKTPSELRSSTGILSLTFHTDMAVAKDGFSARYYLVHQEPLENFQCNVPLGMESGRIANEQISASSTYSDGRWTPQQSRLHGDDNGWTPNLDSNKEYLQVDLRFLTMLTAIATQGAISRETQNGYYVKSYKLEVSTNGEDWMVYRHGKNHKVFQANNDATEVVLNKLHAPLLTRFVRIRPQTWHSGIALRLELFGCRVTDAPCSNMLGMLSGLIADSQISASSTQEYLWSPSAARLVSSRSGWFPRIPQAQPGEEWLQVDLGTPKTVKGVIIQGARGGDSITAVEARAFVRKFKVSYSLNGKDWEYIQDPRTQQPKLFEGNMHYDTPDIRRFDPIPAQYVRVYPERWSPAGIGMRLEVLGCDWTDSKPTVETLGPTVKSEETTTPYPTEEEATECGENCSFEDDKDLQLPSGFNCNFDFLEEPCGWMYDHAKWLRTTWASSSSPNDRTFPDDRNFLRLQSDSQREGQYARLISPPVHLPRSPVCMEFQYQATGGRGVALQVVREASQESKLLWVIREDQGGEWKHGRIILPSYDMEYQIVFEGVIGKGRSGEIAIDDIRISTDVPLENCMEPISAFADEYEVDWSNSSSATSGSGAPSTDKEKSWLYTLDPILITIIAMSSLGVLLGATCAGLLLYCTCSYSGLSSRSCTTLENYNFELYDGLKHKVKMNHQKCCSEA

SEQ ID NO: 163 - DNA, 4163 bp, Homo sapiens
  CDS (792)..(3512)
cagagatcgcgagcgaggcaccagcctgcagccggcccccagcacatcctcagccgcacagacactcggcgaggtggaggtgagggcgggcgccagcgaactcggagaggggctcgctcactcccaggcgatcccagccgccaccgccgccgcaccagcagcagcaacagcagcagcagcttccttcctcagactcccctcgagaggctggccaagcgggtgtagccgttgggggaggctcccgccgggggaacccggcgaggacaagagcagggcggccgccttccactcgggctgtccggcggcggctgcctccgcccgtgtgtccgtcaagggtgccgcgggatgtgtgtcagtttacgcctctgagatcacacagctgcctgggggccgtgtgatgcccaaggcaagtcttggttttaattattattattatcattattgttacgcttggctttcgggaaatactcgtgatatttgtaggataaaggaaatgacactttgaggaactggagagaacatatatgcgttttgtttttaagaggaaaaccgtgttctcttcccggcttgttccctctttgctgatttcaggagctactctcctcctggtgaggtggaaattccagcaagaatagaggtgaagacaagccaccaggactcaggagggaaacgctgaccattagaaacctctgcataagacgttgtaaggaggaaaataaaagagagaaaaacacaaagatttaaacaagaaacctacgaacccagctctggaaagagccaccttctccaaaatggatatgtttcctctcacctgggttttcttagccctctacttttcaagacaccaagtgagaggccaaccagacccaccgtgcggaggtcgtttgaattccaaagatgctggctatatcacctctcccggttacccccaggactacccctcccaccagaactgcgagtggattgtttacgcccccgaacccaaccagaagattgtcctcaacttcaaccctcactttgaaatcgagaagcacgactgcaagtatgactttatcgagattcgggatggggacagtgaatccgcagacctcctgggcaaacactgtgggaacatcgccccgcccaccatcatctcctcgggctccatgctctacatcaagttcacctccgactacgcccggcagggggcaggcttctctctgcgctacgagatcttcaagacaggctctgaagattgctcaaaaaacttcacaagccccaacgggaccatcgaatctcctgggtttcctgagaagtatccacacaacttggactgcacctttaccatcctggccaaacccaagatggagatcatcctgcagttcctgatctttgacctggagcatgaccctttgcaggtgggagagggggactgcaagtacgattggctggacatctgggatggcattccacatgttggccccctgattggcaagtactgtgggaccaaaacaccctctgaacttcgttcatcgacggggatcctctccctgacctttcacacggacatggcggtggccaaggatggcttctctgcgcgttactacctggtccaccaagagccactagagaactttcagtgcaatgttcctctgggcatggagtctggccggattgctaatgaacagatcagtgcctcatctacctactctgatgggaggtggacccctcaacaaagccggctccatggtgatgacaatggctggacccccaacttggattccaacaaggagtatctccaggtggacctgcgctttttaaccatgctcacggccatcgcaacacagggagcgatttccagggaaacacagaatggctactatgtcaaatcctacaagctggaagtcagcactaatggagaggactggatggtgtaccggcatggcaaaaaccacaaggtatttcaagccaacaacgatgcaactgaggtggttctgaacaagctccacgctccactgctgacaaggtttgttagaatccgccctcagacctggcactcaggtatcgccctccggctggagctcttcggctgccgggtcacagatgctccctgctccaacatgctggggatgctctcaggcctcattgcagactcccagatctccgcctcttccacccaggaatacctctggagccccagtgcagcccgcctggtcagcagccgctcgggctggttccctcgaatccctcaggcccagcccggtgaggagtggcttcaggtagatctgggaacacccaagacagtgaaaggtgtcatcatccagggagcccgcggaggagacagtatcactgctgtggaagccagagcatttgtgcgcaagttcaaagtctcctacagcctaaacggcaaggactgggaatacattcaggaccccaggacccagcagccaaagctgttcgaagggaacatgcactatgacacccctgacatccgaaggtttgaccccattccggcacagtatgtgcgggtatacccggagaggtggtcgccggcggggattgggatgcggctggaggtgctgggctgtgactggacagactccaagcccacggtagagacgctgggacccactgtgaagagcgaagagacaaccaccccctaccccaccgaagaggaggccacagagtgtggggagaactgcagctttgaggatgacaaagatttgcagctcccttcgggattcaattgcaacttcgatttcctcgaggagccctgtggttggatgtatgaccatgccaagtggctccggaccacctgggccagcagctccagcccaaacgaccggacgtttccagatgacaggaatttcttgcggctgcagagtgacagccagagagagggccagtatgcccggctcatcagcccccctgtccacctgccccgaagcccggtgtgcatggagttccagtaccaggccacgggcggccgcggggtggcgctgcaggtggtgcgggaagccagccaggagagcaagttgctgtgggtcatccgtgaggaccagggcggcgagtggaagcacgggcggatcatcctgcccagctacgacatggagtaccagattgtgttcgagggagtgatagggaaaggacgttccggagagattgccattgatgacattcggataagcactgatgtcccactggagaactgcatggaacccatctcggcttttgcaggtgagaattttaaagggggcaccctcctgccagggaccgagcccacagtggacacggtgcccatgcagcccatcccagcctactggtattacgtaatggccgccgggggcgccgtgctggtgctggtctccgtcgcgctggccctggtgctccactaccaccggttccgctatgcggccaagaagaccgatcactccatcacctacaaaacctcccactacaccaacggggcccctctggcggtggagcccaccctaaccattaagctagagcaagaccgtggctcgcactgctgagggccgaagcaagaacagcacccaaaacaaacgagaaagactgcaaacatgttgcctcgattttgcacttttttctcctcgcctagtttctgtgtgaactctcagacatctctttcccggatccccaaccctgagcactcttatcaatcccaaccatcctccttgggttcattttggtttctggtttttctttttcctttttgttgattccaaaccaacaaacccaactctaatgctgcatcttggactatccgaagagatccacccccaagcactccacaactcaaggctcagctggttttgttccagagactggttcgcttgttttttccccttgccttatcccatacctcctctcagtgggcagtctgccaggagacgtgaggggaagcctggatctgtgtgtatgtacatagtagacatgtgtgtgtgtgaatagctctctgtgtgtgggtgtgtgagagagcggctggttcattgtgtgtgtgtttgggcgaggggtgagtgttcagagagggcccctttaactcttatgttacttctcctggggtacattttacaagaaaataatatactgtacaagttttgtttacttggagaagagattgaagctttttgttgccttatctaaaaaaaaaaaaaaaaaaaaaa

SEQ ID NO: 164 - protein, 906 aa, Homo sapiens
MDMFPLTWVFLALYFSRHQVRGQPDPPCGGRLNSKDAGYITSPGYPQDYPSHQNCEWIVYAPEPNQKIVLNFNPHFEIEKHDCKYDFIEIRDGDSESADLLGKHCGNIAPPTIISSGSMLYIKFTSDYARQGAGFSLRYEIFKTGSEDCSKNFTSPNGTIESPGFPEKYPHNLDCTFTILAKPKMEIILQFLIFDLEHDPLQVGEGDCKYDWLDIWDGIPHVGPLIGKYCGTKTPSELRSSTGILSLTFHTDMAVAKDGFSARYYLVHQEPLENFQCNVPLGMESGRIANEQISASSTYSDGRWTPQQSRLHGDDNGWTPNLDSNKEYLQVDLRFLTMLTAIATQGAISRETQNGYYVKSYKLEVSTNGEDWMVYRHGKNHKVFQANNDATEVVLNKLHAPLLTRFVRIRPQTWHSGIALRLELFGCRVTDAPCSNMLGMLSGLIADSQISASSTQEYLWSPSAARLVSSRSGWFPRIPQAQPGEEWLQVDLGTPKTVKGVIIQGARGGDSITAVEARAFVRKFKVSYSLNGKDWEYIQDPRTQQPKLFEGNMHYDTPDIRRFDPIPAQYVRVYPERWSPAGIGMRLEVLGCDWTDSKPTVETLGPTVKSEETTTPYPTEEEATECGENCSFEDDKDLQLPSGFNCNFDFLEEPCGWMYDHAKWLRTTWASSSSPNDRTFPDDRNFLRLQSDSQREGQYARLISPPVHLPRSPVCMEFQYQATGGRGVALQVVREASQESKLLWVIREDQGGEWKHGRIILPSYDMEYQIVFEGVIGKGRSGEIAIDDIRISTDVPLENCMEPISAFAGENFKGGTLLPGTEPTVDTVPMQPIPAYWYYVMAAGGAVLVLVSVALALVLHYHRFRYAAKKTDHSITYKTSHYTNGAPLAVEPTLTIKLEQDRGSHC

SEQ ID NO: 165 - DNA, 4148 bp, Homo sapiens
  CDS (792)..(3497)
cagagatcgcgagcgaggcaccagcctgcagccggcccccagcacatcctcagccgcacagacactcggcgaggtggaggtgagggcgggcgccagcgaactcggagaggggctcgctcactcccaggcgatcccagccgccaccgccgccgcaccagcagcagcaacagcagcagcagcttccttcctcagactcccctcgagaggctggccaagcgggtgtagccgttgggggaggctcccgccgggggaacccggcgaggacaagagcagggcggccgccttccactcgggctgtccggcggcggctgcctccgcccgtgtgtccgtcaagggtgccgcgggatgtgtgtcagtttacgcctctgagatcacacagctgcctgggggccgtgtgatgcccaaggcaagtcttggttttaattattattattatcattattgttacgcttggctttcgggaaatactcgtgatatttgtaggataaaggaaatgacactttgaggaactggagagaacatatatgcgttttgtttttaagaggaaaaccgtgttctcttcccggcttgttccctctttgctgatttcaggagctactctcctcctggtgaggtggaaattccagcaagaatagaggtgaagacaagccaccaggactcaggagggaaacgctgaccattagaaacctctgcataagacgttgtaaggaggaaaataaaagagagaaaaacacaaagatttaaacaagaaacctacgaacccagctctggaaagagccaccttctccaaaatggatatgtttcctctcacctgggttttcttagccctctacttttcaagacaccaagtgagaggccaaccagacccaccgtgcggaggtcgtttgaattccaaagatgctggctatatcacctctcccggttacccccaggactacccctcccaccagaactgcgagtggattgtttacgcccccgaacccaaccagaagattgtcctcaacttcaaccctcactttgaaatcgagaagcacgactgcaagtatgactttatcgagattcgggatggggacagtgaatccgcagacctcctgggcaaacactgtgggaacatcgccccgcccaccatcatctcctcgggctccatgctctacatcaagttcacctccgactacgcccggcagggggcaggcttctctctgcgctacgagatcttcaagacaggctctgaagattgctcaaaaaacttcacaagccccaacgggaccatcgaatctcctgggtttcctgagaagtatccacacaacttggactgcacctttaccatcctggccaaacccaagatggagatcatcctgcagttcctgatctttgacctggagcatgaccctttgcaggtgggagagggggactgcaagtacgattggctggacatctgggatggcattccacatgttggccccctgattggcaagtactgtgggaccaaaacaccctctgaacttcgttcatcgacggggatcctctccctgacctttcacacggacatggcggtggccaaggatggcttctctgcgcgttactacctggtccaccaagagccactagagaactttcagtgcaatgttcctctgggcatggagtctggccggattgctaatgaacagatcagtgcctcatctacctactctgatgggaggtggacccctcaacaaagccggctccatggtgatgacaatggctggacccccaacttggattccaacaaggagtatctccaggtggacctgcgctttttaaccatgctcacggccatcgcaacacagggagcgatttccagggaaacacagaatggctactatgtcaaatcctacaagctggaagtcagcactaatggagaggactggatggtgtaccggcatggcaaaaaccacaaggtatttcaagccaacaacgatgcaactgaggtggttctgaacaagctccacgctccactgctgacaaggtttgttagaatccgccctcagacctggcactcaggtatcgccctccggctggagctcttcggctgccgggtcacagatgctccctgctccaacatgctggggatgctctcaggcctcattgcagactcccagatctccgcctcttccacccaggaatacctctggagccccagtgcagcccgcctggtcagcagccgctcgggctggttccctcgaatccctcaggcccagcccggtgaggagtggcttcaggtagatctgggaacacccaagacagtgaaaggtgtcatcatccagggagcccgcggaggagacagtatcactgctgtggaagccagagcatttgtgcgcaagttcaaagtctcctacagcctaaacggcaaggactgggaatacattcaggaccccaggacccagcagccaaagctgttcgaagggaacatgcactatgacacccctgacatccgaaggtttgaccccattccggcacagtatgtgcgggtatacccggagaggtggtcgccggcggggattgggatgcggctggaggtgctgggctgtgactggacagactccaagcccacggtagagacgctgggacccactgtgaagagcgaagagacaaccaccccctaccccaccgaagaggaggccacagagtgtggggagaactgcagctttgaggatgacaaagatttgcagctcccttcgggattcaattgcaacttcgatttcctcgaggagccctgtggttggatgtatgaccatgccaagtggctccggaccacctgggccagcagctccagcccaaacgaccggacgtttccagatgacaggaatttcttgcggctgcagagtgacagccagagagagggccagtatgcccggctcatcagcccccctgtccacctgccccgaagcccggtgtgcatggagttccagtaccaggccacgggcggccgcggggtggcgctgcaggtggtgcgggaagccagccaggagagcaagttgctgtgggtcatccgtgaggaccagggcggcgagtggaagcacgggcggatcatcctgcccagctacgacatggagtaccagattgtgttcgagggagtgatagggaaaggacgttccggagagattgccattgatgacattcggataagcactgatgtcccactggagaactgcatggaacccatctcggcttttgcagggggcaccctcctgccagggaccgagcccacagtggacacggtgcccatgcagcccatcccagcctactggtattacgtaatggccgccgggggcgccgtgctggtgctggtctccgtcgcgctggccctggtgctccactaccaccggttccgctatgcggccaagaagaccgatcactccatcacctacaaaacctcccactacaccaacggggcccctctggcggtggagcccaccctaaccattaagctagagcaagaccgtggctcgcactgctgagggccgaagcaagaacagcacccaaaacaaacgagaaagactgcaaacatgttgcctcgattttgcacttttttctcctcgcctagtttctgtgtgaactctcagacatctctttcccggatccccaaccctgagcactcttatcaatcccaaccatcctccttgggttcattttggtttctggtttttctttttcctttttgttgattccaaaccaacaaacccaactctaatgctgcatcttggactatccgaagagatccacccccaagcactccacaactcaaggctcagctggttttgttccagagactggttcgcttgttttttccccttgccttatcccatacctcctctcagtgggcagtctgccaggagacgtgaggggaagcctggatctgtgtgtatgtacatagtagacatgtgtgtgtgtgaatagctctctgtgtgtgggtgtgtgagagagcggctggttcattgtgtgtgtgtttgggcgaggggtgagtgttcagagagggcccctttaactcttatgttacttctcctggggtacattttacaagaaaataatatactgtacaagttttgtttacttggagaagagattgaagctttttgttgccttatctaaaaaaaaaaaaaaaaaaaaaa

SEQ ID NO: 166 - protein, 901 aa, Homo sapiens
MDMFPLTWVFLALYFSRHQVRGQPDPPCGGRLNSKDAGYITSPGYPQDYPSHQNCEWIVYAPEPNQKIVLNFNPHFEIEKHDCKYDFIEIRDGDSESADLLGKHCGNIAPPTIISSGSMLYIKFTSDYARQGAGFSLRYEIFKTGSEDCSKNFTSPNGTIESPGFPEKYPHNLDCTFTILAKPKMEIILQFLIFDLEHDPLQVGEGDCKYDWLDIWDGIPHVGPLIGKYCGTKTPSELRSSTGILSLTFHTDMAVAKDGFSARYYLVHQEPLENFQCNVPLGMESGRIANEQISASSTYSDGRWTPQQSRLHGDDNGWTPNLDSNKEYLQVDLRFLTMLTAIATQGAISRETQNGYYVKSYKLEVSTNGEDWMVYRHGKNHKVFQANNDATEVVLNKLHAPLLTRFVRIRPQTWHSGIALRLELFGCRVTDAPCSNMLGMLSGLIADSQISASSTQEYLWSPSAARLVSSRSGWFPRIPQAQPGEEWLQVDLGTPKTVKGVIIQGARGGDSITAVEARAFVRKFKVSYSLNGKDWEYIQDPRTQQPKLFEGNMHYDTPDIRRFDPIPAQYVRVYPERWSPAGIGMRLEVLGCDWTDSKPTVETLGPTVKSEETTTPYPTEEEATECGENCSFEDDKDLQLPSGFNCNFDFLEEPCGWMYDHAKWLRTTWASSSSPNDRTFPDDRNFLRLQSDSQREGQYARLISPPVHLPRSPVCMEFQYQATGGRGVALQVVREASQESKLLWVIREDQGGEWKHGRIILPSYDMEYQIVFEGVIGKGRSGEIAIDDIRISTDVPLENCMEPISAFAGGTLLPGTEPTVDTVPMQPIPAYWYYVMAAGGAVLVLVSVALALVLHYHRFRYAAKKTDHSITYKTSHYTNGAPLAVEPTLTIKLEQDRGSHC

SEQ ID NO: 167 - DNA, 2601 bp, Homo sapiens
  CDS (792)..(2459)
cagagatcgcgagcgaggcaccagcctgcagccggcccccagcacatcctcagccgcacagacactcggcgaggtggaggtgagggcgggcgccagcgaactcggagaggggctcgctcactcccaggcgatcccagccgccaccgccgccgcaccagcagcagcaacagcagcagcagcttccttcctcagactcccctcgagaggctggccaagcgggtgtagccgttgggggaggctcccgccgggggaacccggcgaggacaagagcagggcggccgccttccactcgggctgtccggcggcggctgcctccgcccgtgtgtccgtcaagggtgccgcgggatgtgtgtcagtttacgcctctgagatcacacagctgcctgggggccgtgtgatgcccaaggcaagtcttggttttaattattattattatcattattgttacgcttggctttcgggaaatactcgtgatatttgtaggataaaggaaatgacactttgaggaactggagagaacatatatgcgttttgtttttaagaggaaaaccgtgttctcttcccggcttgttccctctttgctgatttcaggagctactctcctcctggtgaggtggaaattccagcaagaatagaggtgaagacaagccaccaggactcaggagggaaacgctgaccattagaaacctctgcataagacgttgtaaggaggaaaataaaagagagaaaaacacaaagatttaaacaagaaacctacgaacccagctctggaaagagccaccttctccaaaatggatatgtttcctctcacctgggttttcttagccctctacttttcaagacaccaagtgagaggccaaccagacccaccgtgcggaggtcgtttgaattccaaagatgctggctatatcacctctcccggttacccccaggactacccctcccaccagaactgcgagtggattgtttacgcccccgaacccaaccagaagattgtcctcaacttcaaccctcactttgaaatcgagaagcacgactgcaagtatgactttatcgagattcgggatggggacagtgaatccgcagacctcctgggcaaacactgtgggaacatcgccccgcccaccatcatctcctcgggctccatgctctacatcaagttcacctccgactacgcccggcagggggcaggcttctctctgcgctacgagatcttcaagacaggctctgaagattgctcaaaaaacttcacaagccccaacgggaccatcgaatctcctgggtttcctgagaagtatccacacaacttggactgcacctttaccatcctggccaaacccaagatggagatcatcctgcagttcctgatctttgacctggagcatgaccctttgcaggtgggagagggggactgcaagtacgattggctggacatctgggatggcattccacatgttggccccctgattggcaagtactgtgggaccaaaacaccctctgaacttcgttcatcgacggggatcctctccctgacctttcacacggacatggcggtggccaaggatggcttctctgcgcgttactacctggtccaccaagagccactagagaactttcagtgcaatgttcctctgggcatggagtctggccggattgctaatgaacagatcagtgcctcatctacctactctgatgggaggtggacccctcaacaaagccggctccatggtgatgacaatggctggacccccaacttggattccaacaaggagtatctccaggtggacctgcgctttttaaccatgctcacggccatcgcaacacagggagcgatttccagggaaacacagaatggctactatgtcaaatcctacaagctggaagtcagcactaatggagaggactggatggtgtaccggcatggcaaaaaccacaaggtatttcaagccaacaacgatgcaactgaggtggttctgaacaagctccacgctccactgctgacaaggtttgttagaatccgccctcagacctggcactcaggtatcgccctccggctggagctcttcggctgccgggtcacagatgctccctgctccaacatgctggggatgctctcaggcctcattgcagactcccagatctccgcctcttccacccaggaatacctctggagccccagtgcagcccgcctggtcagcagccgctcgggctggttccctcgaatccctcaggcccagcccggtgaggagtggcttcaggtagatctgggaacacccaagacagtgaaaggtgtcatcatccagggagcccgcggaggagacagtatcactgctgtggaagccagagcatttgtgcgcaagttcaaagtctcctacagcctaaacggcaaggactgggaatacattcaggaccccaggacccagcagccaaaggtaggctgttcttggaggcctctgtaacgttaccctcaacagggaggctaagtgtggtacagggagttgagactgatgatgtcccatctaaacagtcgtcatccaactcctgaaatccaataaaacaaatatcgtttgagagattaaaaaaaaaaaaaaaaaaaaaaaa

SEQ ID NO: 168 - protein, 555 aa, Homo sapiens
MDMFPLTWVFLALYFSRHQVRGQPDPPCGGRLNSKDAGYITSPGYPQDYPSHQNCEWIVYAPEPNQKIVLNFNPHFEIEKHDCKYDFIEIRDGDSESADLLGKHCGNIAPPTIISSGSMLYIKFTSDYARQGAGFSLRYEIFKTGSEDCSKNFTSPNGTIESPGFPEKYPHNLDCTFTILAKPKMEIILQFLIFDLEHDPLQVGEGDCKYDWLDIWDGIPHVGPLIGKYCGTKTPSELRSSTGILSLTFHTDMAVAKDGFSARYYLVHQEPLENFQCNVPLGMESGRIANEQISASSTYSDGRWTPQQSRLHGDDNGWTPNLDSNKEYLQVDLRFLTMLTAIATQGAISRETQNGYYVKSYKLEVSTNGEDWMVYRHGKNHKVFQANNDATEVVLNKLHAPLLTRFVRIRPQTWHSGIALRLELFGCRVTDAPCSNMLGMLSGLIADSQISASSTQEYLWSPSAARLVSSRSGWFPRIPQAQPGEEWLQVDLGTPKTVKGVIIQGARGGDSITAVEARAFVRKFKVSYSLNGKDWEYIQDPRTQQPKVGCSWRPL

SEQ ID NO: 169 - DNA, 1801 bp, Homo sapiens
  CDS (175)..(1260)
atgctcagtcacagggtgacagagaaaaaaaaagtcaccaccataaaaggaggtctgcacagcctctcttaaaacaacatgccacagttaaaacttacttcagtttggacaactactcacagctactacacagagacccgaacgagtcactgatatacacctggaccaccaccaatggatatacaaatggcaaacaattttactccgccctctgcaactcctcagggaaatgactgtgacctctatgcacatcacagcacggccaggatagtaatgcctctgcattacagcctcgtcttcatcattgggctcgtgggaaacttactagccttggtcgtcattgttcaaaacaggaaaaaaatcaactctaccaccctctattcaacaaatttggtgatttctgatatactttttaccaccgctttgcctacacgaatagcctactatgcaatgggctttgactggagaatcggagatgccttgtgtaggataactgcgctagtgttttacatcaacacatatgcaggtgtgaactttatgacctgcctgagtattgaccgcttcattgctgtggtgcaccctctacgctacaacaagataaaaaggattgaacatgcaaaaggcgtgtgcatatttgtctggattctagtatttgctcagacactcccactcctcatcaaccctatgtcaaagcaggaggctgaaaggattacatgcatggagtatccaaactttgaagaaactaaatctcttccctggattctgcttggggcatgtttcataggatatgtacttccacttataatcattctcatctgctattctcagatctgctgcaaactcttcagaactgccaaacaaaacccactcactgagaaatctggtgtaaacaaaaaggctctcaacacaattattcttattattgttgtgtttgttctctgtttcacaccttaccatgttgcaattattcaacatatgattaagaagcttcgtttctctaatttcctggaatgtagccaaagacattcgttccagatttctctgcactttacagtatgcctgatgaacttcaattgctgcatggacccttttatctacttctttgcatgtaaagggtataagagaaaggttatgaggatgctgaaacggcaagtcagtgtatcgatttctagtgctgtgaagtcagcccctgaagaaaattcacgtgaaatgacagaaacgcagatgatgatacattccaagtcttcaaatggaaagtgaaatggattgtattttggtttatagtgacgtaaactgtatgacaaactttgcaggacttcccttataaagcaaaataattgttcagcttccaattagtattcttttatatttctttcattgggcactttcccatctccaactcggaagtaagcccaagagaacaacataaagcaaacaacataaagcacaataaaaatgcaaataaatatttcatttttatttgtaaacgaatacaccaaaaggaggcgctcttaataactcccaatgtaaaaagttttgttttaataaaaaatttaattattatttcttgccaacaaatggctagaaaggactgaatagattatatattgccagatgttaatactgtaacatactttttaaataacatatttcttaaatccaaatttctctcaatgttagatttaattccctcaataacaccaatgttttgttttgtttcgttctgggtcataaaactttgttaaggaactcttttggaataaagagcaggatgctgcaaagttaaaaaaaaaaaaaaaaa

SEQ ID NO: 170 - protein, 361 aa, Homo sapiens [sequence omitted]

SEQ ID NO: 171 - DNA, 4390 bp, Homo sapiens
  CDS (191)..(1051)
gagttggggccagctccccacccccaagaggccccacattccgggccagcagcccagaaagtccctccccgcaggcggagacagccccaagaagtcgacgccccggtcccgccgcccggccactacccagagggctgccgccgcctctccaagttcttgtggcccccgcggtgcggagtatggggcgctgatggccatggagggctactggcgcttcctggcgctgctggggtcggcactgctcgtcggcttcctgtcggtgatcttcgccctcgtctgggtcctccactaccgagaggggcttggctgggatgggagcgcactagagtttaactggcacccagtgctcatggtcaccggcttcgtcttcatccagggcatcgccatcatcgtctacagactgccgtggacctggaaatgcagcaagctcctgatgaaatccatccatgcagggttaaatgcagttgctgccattcttgcaattatctctgtggtggccgtgtttgagaaccacaatgttaacaatatagccaatatgtacagtctgcacagctgggttggactgatagctgtcatatgctatttgttacagcttctttcaggtttttcagtctttctgcttccatgggctccgctttctctccgagcatttctcatgcccatacatgtttattctggaattgtcatctttggaacagtgattgcaacagcacttatgggattgacagagaaactgattttttccctgagagatcctgcatacagtacattcccgccagaaggtgttttcgtaaatacgcttggccttctgatcctggtgttcggggccctcattttttggatagtcaccagaccgcaatggaaacgtcctaaggagccaaattctaccattcttcatccaaatggaggcactgaacagggagcaagaggttccatgccagcctactctggcaacaacatggacaaatcagattcagagttaaacagtgaagtagcagcaaggaaaagaaacttagctctggatgaggctgggcagagatctaccatgtaaaatgttgtagagatagagccatataacgtcacgtttcaaaactagctctacagttttgcttctcctattagccatatgataattgggctatgtagtatcaatatttactttaatcacaaaggatggtttcttgaaataatttgtattgattgaggcctatgaactgacctgaattggaaaggatgtgattaatataaataatagcagatataaattgtggttatgttacctttatcttgttgaggaccacaacattagcacggtgccttgtgcagaatagatactcaatatgtgaatatgtgtctactagtagttaattggataaactggcagcatccctggcctgttgtcatgcagtcatttcctgttaattctgggagacaatgatttcacaactagcgggaagcagtcctaaaagtttaaaatccgataaggaatatctgggacagggtttagatcatgactctacacagataccatgatgagagtatattaaagaaatttaggaaagcacctggttcctttctccccatgcctgccttctgctccctccccagctggtttgggctcaaattgtccctggagactagggtttatgttagggtattgatagattagagcaggtggttgaagagatcttctctggtcagacttggaagaatttccaaaactgaagttagccccaagacttccctagggttgatgtactttatgatccagatgctaaacttcttagaatgaaaatatgcttcaacacttaagtagcatacactgccctacaaacctcagagagcacttttccccaagttcttgtttttatttttgaaagtactcacacagcacttactatgctccaaacactcctctaagcactttacacatattagctcattcagtccccagacagacgggatgaagtaggtattgttactgttcccattttacaggtgagagatttgaagcctggggaggctagtaactcaccccaaggtcacacggctcatacatggtgggactgagactcagatgcaggcagtctggcacctcagtctggattctaaccatttcactaagctatttttgtcttgtactactttgacccacccctgaataaacctcaattgctggagtggggtgtagttattaaagggatgctttttaccttttgctgtttgctgtggcagattccccagataaccaaggaaaaggggccacccatacctggaaataggccatagggcccctactactgccaacaagccatggcctaccttgacacttgtttgatcttaaaattgtgtcttggtaacaaaagatttggacaggcatatctgtagctttcaagttaattaattgcaatatttttttcttcaggattttagctgctgaacaactttcagtttggagctaaaagagacctgtctcatggtctgcccttccctggggcaatagctagggtctttcctgatttttatggaattttaggggatattttgagctttgggttctcagtagtgaattgagacttggaggtgacttttcatgtttggagtatcatctctgtctgggatctgggctgacaaattaaaacctagagtagtgcttatgctgaaatgatacttttcattttttggttgatttttttgccttcccttcaattttaaactgaagcattttaatatgggtagaaactctacaccaaatacactaaacattttggtgcttagtggatttctttttaggtaactggtacttacttccaaagactgaatacaagccacactccatcatatcccttaaacttcatgaaaaaccattcaagatccccttgctgcaacactgttctcttcttctctactaaattctatttccaaaattggtaatagagccagaaggatccccagtacccagccctctgcctggcacaaagtggtagcacaattaaattcagtatgggtggagcatggtacagtcttggtgccatagaaggagtagttgcatagtcacacatcatttgataagttggatgttccattacatagaggaacacaaaattccagggtttttggaggaagggattagatagtgactaagccgccagaattgaggtggccattcctttttgtataggctaagaaacaggttatcagtgaaaagttaattatggctttggcactagaatagcactgttgcaaagtatttaagcaccccccatctcagccctttattttatctttcatgtgggctaatgtgaggataatcttacagatattataggaatttcttttctatctttatgaaaacaacgtatataaaatatatctagaaaacctttgtttgagactcttatttaatgggcttttgattctaatgataattgtacctttatctttcaaaagctgatatttcctacctaagcatctcccgagaaaaatatctcattaaaaagcccataaataataggggagaagaaagccttaggtatcaattccaaaacagtgattgaaatttcccaaaataattatggcttctgtcatctccagagataatctggcttggtttaccccataatctaatttcagaaaagaaagctttattttaacactcatctgaatcaacattaaagccttttctctcaaagcgtttattgagaaactcaaatgaatatactttttgaattactgtcatcaaaagtgtacggcttcctgtgctgcttgtgtcaaatggaacctgccctctaaagcactttctttcctttacttgcgtggtttcatgtaagctgtgctgtttagaaacaacatctcagactttacaaagaaatgacaaagaaggcaattgcactttttaagggatatcgacaagcagtttctgttttctaaaggacaaaatacagagtgtgtgtcatttttaattagattctttcccctgctgagttggaaattccagtgcagcactgattgaccacagttgccaatctaaaagcacaaagacagaagtaaagctttatgctaattttatttcaatatgatagaaaatttatcttggtatgtccttttttagataactccagcaggaaactgtaactgctatgtctttaggaaaatgtagaagaaagaacattattgttctttaattcctacaaggtactcgaaaaccttaagtgaaaaagatttctatctttttatcttagcgcatttatggaaaaaatattaactatcctgaatattttataattttgtaggaaaaatatgcatctattttttcttgacttcttttatatagtaataaaagttattttggaagctcaaaaaaaaaaaaaaaaaaaaaaaaaaaaaaaaa

SEQ ID NO: 172 - protein, 286 aa, Homo sapiens
MAMEGYWRFLALLGSALLVGFLSVIFALVWVLHYREGLGWDGSALEFNWHPVLMVTGFVFIQGIAIIVYRLPWTWKCSKLLMKSIHAGLNAVAAILAIISVVAVFENHNVNNIANMYSLHSWVGLIAVICYLLQLLSGFSVFLLPWAPLSLRAFLMPIHVYSGIVIFGTVIATALMGLTEKLIFSLRDPAYSTFPPEGVFVNTLGLLILVFGALIFWIVTRPQWKRPKEPNSTILHPNGGTEQGARGSMPAYSGNNMDKSDSELNSEVAARKRNLALDEAGQRSTM

SEQ ID NO: 173 - DNA, 4153 bp, Homo sapiens
  CDS (191)..(664)
gagttggggccagctccccacccccaagaggccccacattccgggccagcagcccagaaagtccctccccgcaggcggagacagccccaagaagtcgacgccccggtcccgccgcccggccactacccagagggctgccgccgcctctccaagttcttgtggcccccgcggtgcggagtatggggcgctgatggccatggagggctactggcgcttcctggcgctgctggggtcggcactgctcgtcggcttcctgtcggtgatcttcgccctcgtctgggtcctccactaccgagaggggcttggctgggatgggagcgcactagagtttaactggcacccagtgctcatggtcaccggcttcgtcttcatccagggcatcgcttctttcaggtttttcagtctttctgcttccatgggctccgctttctctccgagcatttctcatgcccatacatgtttattctggaattgtcatctttggaacagtgattgcaacagcacttatgggattgacagagaaactgattttttccctgagagatcctgcatacagtacattcccgccagaaggtgttttcgtaaatacgcttggccttctgatcctggtgttcggggccctcattttttggatagtcaccagaccgcaatggaaacgtcctaaggagccaaattctaccattcttcatccaaatggaggcactgaacagggagcaagaggttccatgccagcctactctggcaacaacatggacaaatcagattcagagttaaacagtgaagtagcagcaaggaaaagaaacttagctctggatgaggctgggcagagatctaccatgtaaaatgttgtagagatagagccatataacgtcacgtttcaaaactagctctacagttttgcttctcctattagccatatgataattgggctatgtagtatcaatatttactttaatcacaaaggatggtttcttgaaataatttgtattgattgaggcctatgaactgacctgaattggaaaggatgtgattaatataaataatagcagatataaattgtggttatgttacctttatcttgttgaggaccacaacattagcacggtgccttgtgcagaatagatactcaatatgtgaatatgtgtctactagtagttaattggataaactggcagcatccctggcctgttgtcatgcagtcatttcctgttaattctgggagacaatgatttcacaactagcgggaagcagtcctaaaagtttaaaatccgataaggaatatctgggacagggtttagatcatgactctacacagataccatgatgagagtatattaaagaaatttaggaaagcacctggttcctttctccccatgcctgccttctgctccctccccagctggtttgggctcaaattgtccctggagactagggtttatgttagggtattgatagattagagcaggtggttgaagagatcttctctggtcagacttggaagaatttccaaaactgaagttagccccaagacttccctagggttgatgtactttatgatccagatgctaaacttcttagaatgaaaatatgcttcaacacttaagtagcatacactgccctacaaacctcagagagcacttttccccaagttcttgtttttatttttgaaagtactcacacagcacttactatgctccaaacactcctctaagcactttacacatattagctcattcagtccccagacagacgggatgaagtaggtattgttactgttcccattttacaggtgagagatttgaagcctggggaggctagtaactcaccccaaggtcacacggctcatacatggtgggactgagactcagatgcaggcagtctggcacctcagtctggattctaaccatttcactaagctatttttgtcttgtactactttgacccacccctgaataaacctcaattgctggagtggggtgtagttattaaagggatgctttttaccttttgctgtttgctgtggcagattccccagataaccaaggaaaaggggccacccatacctggaaataggccatagggcccctactactgccaacaagccatggcctaccttgacacttgtttgatcttaaaattgtgtcttggtaacaaaagatttggacaggcatatctgtagctttcaagttaattaattgcaatatttttttcttcaggattttagctgctgaacaactttcagtttggagctaaaagagacctgtctcatggtctgcccttccctggggcaatagctagggtctttcctgatttttatggaattttaggggatattttgagctttgggttctcagtagtgaattgagacttggaggtgacttttcatgtttggagtatcatctctgtctgggatctgggctgacaaattaaaacctagagtagtgcttatgctgaaatgatacttttcattttttggttgatttttttgccttcccttcaattttaaactgaagcattttaatatgggtagaaactctacaccaaatacactaaacattttggtgcttagtggatttctttttaggtaactggtacttacttccaaagactgaatacaagccacactccatcatatcccttaaacttcatgaaaaaccattcaagatccccttgctgcaacactgttctcttcttctctactaaattctatttccaaaattggtaatagagccagaaggatccccagtacccagccctctgcctggcacaaagtggtagcacaattaaattcagtatgggtggagcatggtacagtcttggtgccatagaaggagtagttgcatagtcacacatcatttgataagttggatgttccattacatagaggaacacaaaattccagggtttttggaggaagggattagatagtgactaagccgccagaattgaggtggccattcctttttgtataggctaagaaacaggttatcagtgaaaagttaattatggctttggcactagaatagcactgttgcaaagtatttaagcaccccccatctcagccctttattttatctttcatgtgggctaatgtgaggataatcttacagatattataggaatttcttttctatctttatgaaaacaacgtatataaaatatatctagaaaacctttgtttgagactcttatttaatgggcttttgattctaatgataattgtacctttatctttcaaaagctgatatttcctacctaagcatctcccgagaaaaatatctcattaaaaagcccataaataataggggagaagaaagccttaggtatcaattccaaaacagtgattgaaatttcccaaaataattatggcttctgtcatctccagagataatctggcttggtttaccccataatctaatttcagaaaagaaagctttattttaacactcatctgaatcaacattaaagccttttctctcaaagcgtttattgagaaactcaaatgaatatactttttgaattactgtcatcaaaagtgtacggcttcctgtgctgcttgtgtcaaatggaacctgccctctaaagcactttctttcctttacttgcgtggtttcatgtaagctgtgctgtttagaaacaacatctcagactttacaaagaaatgacaaagaaggcaattgcactttttaagggatatcgacaagcagtttctgttttctaaaggacaaaatacagagtgtgtgtcatttttaattagattctttcccctgctgagttggaaattccagtgcagcactgattgaccacagttgccaatctaaaagcacaaagacagaagtaaagctttatgctaattttatttcaatatgatagaaaatttatcttggtatgtccttttttagataactccagcaggaaactgtaactgctatgtctttaggaaaatgtagaagaaagaacattattgttctttaattcctacaaggtactcgaaaaccttaagtgaaaaagatttctatctttttatcttagcgcatttatggaaaaaatattaactatcctgaatattttataattttgtaggaaaaatatgcatctattttttcttgacttcttttatatagtaataaaagttattttggaagctcaaaaa

SEQ ID NO: 174 - protein, 157 aa, Homo sapiens
MAMEGYWRFLALLGSALLVGFLSVIFALVWVLHYREGLGWDGSALEFNWHPVLMVTGFVFIQGIASFRFFSLSASMGSAFSPSISHAHTCLFWNCHLWNSDCNSTYGIDRETDFFPERSCIQYIPARRCFRKYAWPSDPGVRGPHFLDSHQTAMETS

SEQ ID NO: 175 - DNA, 5244 bp, Homo sapiens
  CDS (153)..(1694)
tttttttttttttttttttttttttttggtctgggcttccgaatatgttttatgacggttgattttacaccaggaggtttgtctccgaggaagacccagggaactggatatctagcgagaacttcctccggattccccggcgcctcgggaaaatgggagctgctgcaaagttggcgtttgccgtctttcttatctcctgttcttcaggtgctatacttggtagatcagaaactcaggagtgtcttttctttaatgctaattgggaaaaagacagaaccaatcaaactggtgttgaaccgtgttatggtgacaaagataaacggcggcattgttttgctacctggaagaatatttctggttccattgaaatagtgaaacaaggttgttggctggatgatatcaactgctatgacaggactgattgtgtagaaaaaaaagacagccctgaagtatatttttgttgctgtgagggcaatatgtgtaatgaaaagttttcttattttccggagatggaagtcacacagcccacttcaaatccagttacacctaagccaccctattacaacatcctgctctattccttggtgccacttatgttaattgcggggattgtcatttgtgcattttgggtgtacaggcatcacaagatggcctaccctcctgtacttgttccaactcaagacccaggaccacccccaccttctccattactaggtttgaaaccactgcagttattagaagtgaaagcaaggggaagatttggttgtgtctggaaagcccagttgcttaacgaatatgtggctgtcaaaatatttccaatacaggacaaacagtcatggcaaaatgaatacgaagtctacagtttgcctggaatgaagcatgagaacatattacagttcattggtgcagaaaaacgaggcaccagtgttgatgtggatctttggctgatcacagcatttcatgaaaagggttcactatcagactttcttaaggctaatgtggtctcttggaatgaactgtgtcatattgcagaaaccatggctagaggattggcatatttacatgaggatatacctggcctaaaagatggccacaaacctgccatatctcacagggacatcaaaagtaaaaatgtgctgttgaaaaacaacctgacagcttgcattgctgactttgggttggccttaaaatttgaggctggcaagtctgcaggcgatacccatggacaggttggtacccggaggtacatggctccagaggtattagagggtgctataaacttccaaagggatgcatttttgaggatagatatgtatgccatgggattagtcctatgggaactggcttctcgctgtactgctgcagatggacctgtagatgaatacatgttgccatttgaggaggaaattggccagcatccatctcttgaagacatgcaggaagttgttgtgcataaaaaaaagaggcctgttttaagagattattggcagaaacatgctggaatggcaatgctctgtgaaaccattgaagaatgttgggatcacgacgcagaagccaggttatcagctggatgtgtaggtgaaagaattacccagatgcagagactaacaaatattattaccacagaggacattgtaacagtggtcacaatggtgacaaatgttgactttcctcccaaagaatctagtctatgatggttgcgccatctgtgcacactaagaaatgggactctgaactggagctgctaagctaaagaaactgcttacagtttattttctgtgtaaaatgagtaggatgtctcttggaaatgttaagaaagaagaccctttgttgaaaaatgttgctctgggagacttactgcattgccgacagcacagatgtgaaggacatgagactaagagaaaccttgcaaactctataaagaaacttttgaaaaagtgtacatgaagaatgtagccctctccaaatcaaggatcttttggacctggctaatggagtgtttgaaaactgacatcagatttcttaatgtctgtcagaagacactaattccttaaatgaactactgctattttttttaaatcaaaaacttttcatttcagattttaaaaagggtaacttgtttttattgcatttgctgttgtttctataaatgactattgtaatgccaatatgacacagcttgtgaatgtttagtgtgctgctgttctgtgtacataaagtcatcaaagtggggtacagtaaagaggcttccaagcattactttaacctccctcaacaaggtatacctcagttccacggttgctaaattataaaattgaaaacactaacaaaatttgaataataaatcgatccatgttttgtaacaaattcactgtgttatttaaggaaaaaaaggtaagctatgcttagtgccaacaataagtggccattcgtaaagcagtgttttagcatttcttgtgctggcttgtaatgtagggaaaaaaagtgctgttttttgaaaagatggtgtcatttcccccttcttcccatgttttaaagccccatcttatatccagttcccaaaatttgcatacttacctaagtattttttttaggtgtgctgtgtttggggaatatttgaaaatttaaagcatgatttaaaattttttaaagtgagctgtgacactggaaagctcttcattttatcttttaaaatagagttttttctatttatatatgtaaaattgtagtgtatttcttttcaccaaacagtgtgtgggacattctttatcactgttttaggatcacctcaggaagtgtcgttacccagaattccccactgtctgctatgagacttgtaactttatcactatacttctgcttggtgccatcttgtcagagtaatatttgatgtctgtgatatgtaaagaattatcctaggataaagatattaaactttaagcagatttcagatgttactgctttaaaacaaatcagggataacaaattaaacgtataacttaaaatatgcaatgacatttagaggtaaccaatgttgatataggtagcatagcctagcctcctccccaaaattgcttttacaactaacactgatactaatttaggatagttcatgccttatccttgctaagaaaatggaattgatggtaggcaggtgctaaagtgcttttcaaaacaatattacgttagaatacaattggattcttcctcaaatttatacaggccaaaaagtaaaacattaattttctgaatttccagattaccaatcaattaatcaacaaatagccagtattatgctgtgtatttctgtcaggtcattttaaaatccatgttaattttataaaagaattttttacatgtcactgtcaggagctcactgtgaatgtgttgtcttcaaatggttatttaaccacacagtacactacattttacatatatgtacgtaatctctgggaatagtaaattaattatgttatttataaacaatacataggtcaacagactttaagcagggaggaaaagaagagtaatagcgtctgtgtgctgcagaccattcagaactgtcacgtgtgtccccatggtctcattcattgtattcctagcaattcccttttcaatgttgagttcacctctttatttcacaaagtacttggtctctcaatttcttgatctggttttgcttccatttaaaaactaatcaagaagggaaaatattgagaatgtgcatacaagaaaatcattaatttcctgaagatgaatttctacctgttgtgaacatttaactttctttttaaaagttaaacaaaaataaacaagggatattatgatgaatgtttggcttatgtgagtactagagataaaatttttaaacccagttattcacaatataaaatgttttcaagttagaaaaaatttttagaaatcctgggtattgtatttaactgtagctaaccaattttaaaacttgtattcttttgagaactattattaatagaaaaactttttataagcagtaaaataagaatgttccagtgactacctgtccttatacctagtcttgttaaaactttcttttgcagggtatttagtgtttggtttacagtcagtgcagagtgggcaagttaacagaaagtttgagctagagatactggaaaaaaaaaagatcaaagaatgagaaaaatggtgatccattttggggcaaactgagaccccccaaataactctttcctcatgtgtatggtgctcctcatgactcgtcttgtattttgcctttctgatacccatcagaactgctgctgctctaacttatactctttaccttgcccagatctccgcgtaaggaatgctttatgatcaacttgccataggactgatggattaaccagtgttcggctttatttgaagtctatgccctgcacagctcttgtatgtattttagatgctagaagtttttttagcatgtgatgtgtgattcttgtttgaattctaggtaccttgtgaattccagaaaaagagactgtgcttcacgattgttagtcccatgaacttgcactatctatctttcatggtgatgttttgaaaatacaatcaggaaaaaacccaacacctttggaatttaaaatagaatcatatcatgaaatttaaaaagaatctcttctgttgcatttcctcacccctaagtaacagctacatttaagtaaaatgcaggtggtaggggaaaaaaaaccatggcgagatggtggtttagtggaataaactgattactggtttttttgtttttttttttttttttaaagaaagaagcttcatcacagatactttccagtttctcttttatacttttttgaaagattactttttaggaacatttggtatgatatgcataaaattatttatccatttatgggcaaaatgatacaagtagcatcttgattgaacatcatttacctcagatattcaaccagcagtacgttttttatgcagtctcaacccatatcccatttgttacctctcagaatattggtaagcagttattttcgctttactctgtatttcttgtgttttgggcacaggttattgtactactgtcaaatcgtacttgctattttttctgcaagtatttaacagaaagcttaaaatccccataaaaccccaccttggataagtgattgttaaatattgtacaaataaaatgtatgctatccccattccatccccaagttaaataaaaaaatgaatacggta

SEQ ID NO: 176 - protein, 513 aa, Homo sapiens
MGAAAKLAFAVFLISCSSGAILGRSETQECLFFNANWEKDRTNQTGVEPCYGDKDKRRHCFATWKNISGSIEIVKQGCWLDDINCYDRTDCVEKKDSPEVYFCCCEGNMCNEKFSYFPEMEVTQPTSNPVTPKPPYYNILLYSLVPLMLIAGIVICAFWVYRHHKMAYPPVLVPTQDPGPPPPSPLLGLKPLQLLEVKARGRFGCVWKAQLLNEYVAVKIFPIQDKQSWQNEYEVYSLPGMKHENILQFIGAEKRGTSVDVDLWLITAFHEKGSLSDFLKANVVSWNELCHIAETMARGLAYLHEDIPGLKDGHKPAISHRDIKSKNVLLKNNLTACIADFGLALKFEAGKSAGDTHGQVGTRRYMAPEVLEGAINFQRDAFLRIDMYAMGLVLWELASRCTAADGPVDEYMLPFEEEIGQHPSLEDMQEVVVHKKKRPVLRDYWQKHAGMAMLCETIEECWDHDAEARLSAGCVGERITQMQRLTNIITTEDIVTVVTMVTNVDFPPKESSL

SEQ ID NO: 177 - DNA, 7018 bp, Homo sapiens
  CDS (50)..(2545)
ggcgggcgcgccgggcggcaggtgtcggcgtcggcggcattcggcggcgatggagcggccctggggagctgcggacggcctctcgcgctggccccatggcctcggcctcctcctcctcctgcagctgctgccgccgtcgaccctcagccaggaccggctggacgcgccgccgccgcccgctgcgccgctgccgcgctggtctggccccatcggggtgagctgggggctgcgggcggccgcagccgggggcgcgtttccccgcggcggccgttggcgtcgcagcgcgccgggcgaggacgaggagtgcggccgggtccgggacttcgtcgccaagctggccaacaacacgcaccagcatgtgtttgatgatctcagaggctcagtatccttgtcctgggttggagatagcactggggtcattctagtcttgactaccttccatgtaccactggtaattatgacttttggacagtccaagctatatcgaagtgaggattatgggaagaactttaaggatattacagatctcatcaataacacctttattcggactgaatttggcatggctattggtcctgagaactctggaaaggtggtgttaacagcagaggtgtctggaggaagtcgtggaggaagaatcttcagatcatcagattttgcgaagaattttgtgcaaacagatctcccttttcatcctctcactcagatgatgtatagccctcagaattctgattatcttttagctctcagcactgaaaatggcctgtgggtgtccaagaattttgggggaaaatgggaagaaatccacaaagcagtatgtttggccaaatggggatcagacaacaccatcttctttacaacctatgcaaatggctcctgcaaagctgaccttggggctctggaattatggagaacttcagacttgggaaaaagcttcaaaactattggtgtgaaaatctactcatttggtcttgggggacgtttcctttttgcctctgtgatggctgataaggataccacaagaaggatccacgtttcaacagatcaaggggacacatggagcatggcccagctcccctccgtgggacaggaacagttctattctattctggcagcaaatgatgacatggtattcatgcatgtagatgaacctggagacactgggtttggcacaatctttacctcagatgatcgaggcattgtctattccaagtctttggaccgacatctctacactaccacaggcggagagacggactttaccaacgtgacctccctccgcggcgtctacataacaagcgtgctctccgaagataattctatccagaccatgatcacttttgaccaaggaggaaggtggacgcacctgaggaagcctgaaaacagtgaatgtgatgctacagcaaaaaacaagaatgagtgcagccttcatattcatgcttcctacagcatctcccagaaactgaatgttccaatggccccactctcagagccgaatgccgtaggcattgtcattgctcatggtagcgtgggggatgccatctcagtgatggttccagatgtgtacatctcagatgatgggggttactcctggacaaagatgctggaaggaccccactattacaccatcctggattctggaggcatcattgtggccattgagcacagcagccgtcctatcaatgtgattaagttctccacagacgaaggtcaatgctggcaaacctacacgttcaccagggaccccatctatttcactggcctagcttcagaacctggagctaggtccatgaatatcagcatttggggcttcacagaatctttcctgaccagccagtgggtctcctacaccattgattttaaagatatccttgaaaggaactgtgaagagaaggactataccatatggctggcacactccacagaccctgaagattatgaagatggctgcattttgggctacaaagaacagtttctgcggctacgcaagtcatccgtgtgtcagaatggtcgagactatgttgtgaccaagcagccctccatctgcctctgttccctggaggactttctctgtgattttggctactaccgtccagaaaatgactccaagtgtgtggaacagccagaactgaagggccacgacctggagttttgtctgtacggaagagaagaacacctaacaacaaatgggtaccggaaaattccaggggacaaatgccagggtggggtaaatccagttcgagaagtaaaagacttgaaaaagaaatgcacaagcaactttttgagtccggaaaaacagaattccaagtcaaattctgttccaattatcctggccatcgtgggattgatgctggtcacagtcgtagcaggagtgctcattgtgaagaaatatgtctgtgggggaaggttcctggtgcatcgatactctgtgctgcagcagcatgcagaggccaatggtgtggatggtgtggatgctttggacacagcctcccacactaataaaagtggttatcatgatgactcagatgaggacctcttggaatagctcttcagaggagctggacccagcatggatggtggaaccacagtacctcttacactccctgtggctccaacttcaggaaataaatttcccattgcgagggacccagctctgtttctgctgcttccatcaaagccaaaaggacctacactaaagaaatgcagggtgggggtggggaaccctgagcacttttttacaattggctctgagaaaaagggagacattttaaattctttaacttcttatttctcgtcctgtctctttgcaaagtatgggcttttttgtttttgttttttaagggaaacgaaatggaattcgaagggaccttttcactaaccccacttctgtgtgttctgcatggcgcctgccccagggcatctgccaactccagtatcagctctcacagtgtacttggtaccatccctgggctctgctggcgagacgaaacagctgtagagatgaaaacaggctgcagaggctggcacagcctggccggcttttctccatctggggacagtcctactccaagaacactgcacaccagctcctcacacagatcccacttactctttttttttttttcagagaccacagaccacagtgatttttcttttcccttgtttaattaggcaatacccttgttaattgccctttggcaactaacttaaccatgtgcttcccacacagtacatcaggaaaacttacagggcaatatttttaacttggggcaggaagaagggagcagcagagaattgactagatatagcacctattaaaagagaactcttgcttcttctgagatttttcaagctgtgctttgtgtgtgtgccagtagacttacgcaaggacagggtacaaacttagctggaagtctgcccaggctgaatgatctcttccctagagttgattgtcgggtacacagtgtgaacccccgaagacggaacctcacagtcttccatgttcccttcttaactgtcgtgtggctcgttgctaaatcatgacaatggctgcctatctgctgcttcttaggttgctgttgtacatggaaccaggactagagattttttcagatttatagacttaaaaaattagaattttattaccaggctttccttctcaccccttttttctgactttgccaagtaatttgttgacacgaaaattttggaggaaccaattgaaaacacacttccagtctagatgatgctttgtgtgatacattaagttcttattttggattaaaagaagttttccatttgatacttctctaaattaaataaattatagaatgtagttgggtggattttggggtggccatatagtaatggaaagctgcaataattagttttaatacagcttgaatatttgctatatagaaatatagtatggaaagtttttggtcttaatgtagctactgtgcgggtcacagtttctcccaatgattatgactgggacattctttggtagataccatttgctactagtttattttgtggctagaaagtcagttttgtgtgtttttttttttttttatttgaagtgccaaattaactttagtcagaatgtgagcagatggctaagttctctcctccccagaatggattaacagctgcgtggaaagtgggggagagagtggatggagacttttagagatgttaaaactgcagtagaatgaaatgagtcagggagcttcagttagaaaataaagttgaggcagtttttgtgaagataatatggttagggctggagtgcactagtctttttgcttattcattttgcatggttttaaaattaaaaataattccgaagatacaccagctcacaaatgaaaacgtcagcctctgccccaccctccctcctgcccaaagtgaatttggtactcagaaaagaactgtttataccactcacctttctcccagcatgtactcactgtgggcagatgcaccaatacatggtaatcctcttactcattttaagacgtaggaaactcaatattcttctctaaccatatacgatagggctcttcgcttttaatgatatctgggatttctgtggaacttggcaaattttcagagcaccttcactcacataatgtcatttgaacctcacaatgttcttgggatggagtcagttgttcagggtccccgtgtgtgtgataagcagtgctggctggctgtcttcagaactcttggaaatctttacacatgcgagtgctaaccactttgagcaaggctgccttcttgtagatgacttgctgttctttatgacagggatcagtggcatttgtttcctagcagtatttagcacctttttgccaccttggtgaacagaaaattgtattttcctgtctttcatggctgaaaacaaaagtaatgggaattttaaatacgtttgcagaaactgcccctcccctcattgagggtcactgctcaagagtgcaggagtggactctccactgatgggtctccctccccatcctggtttccaccccgggctggctagctctgttggtttgaagactgacagccagcctggctcattctcattattggctagttagctttctttatcaacctgctcactcacaaatgtgtgccctcagccagagagtaagaaagcccaaatctgttacagcttctaaaaaaatagatttctaatttgtcctactcatgttaggagcattatctttgaaggtaaaacatagtgtatcattgtgtaaactcccaggcttgatgtagcagaagagatcatttctggaggcttcagcaatggaatttagcattataagagagattggacaaaccagtccaaagtggtccgagttcttaaatccaggtagggaactcactcttctttcttctctggacctaattgggcattgggctttagtgagaccacagaccaggcccgtctctcctgtaggcttttaattcaatggcaactctatttcaaagaataaaagcctttggagagttgcggcagttctgggggcgggctcaggagagtccatagatcagccgtaactggaacgtagaatctacgtctgcctctgaatggacttcccacctcctctctcttgctctgatgcttgcctctgggcctctccatgcccaaggtggtctttcatccttgacaggctggtaatgtgctggccacctccagctcctgcatcgagtctgtaaaccagagctggttctcatggccttcgtcacgataccaggatacggaggggagcccagggccatccatacccaccccagggtaacggggctggcctggcattagtcattatttagtttccaggccaaccatccagatagagattccctctttcctttgagcagtgctctcaagagctccgtgcctgtccacaatgacctagagtgcatcctgctcattgtcagtgtagcccctcgcccctatattcatccaggatacttggaagtgctaaaataggaagggattcggctttcaactttgctaccatcttccctgaagcaggaaaatgaacatggacttaaatgttctttgaaaaaaccaaagttttaagatttgctgtgtgatgaagtgacagggagggccggagtcagcaggtgccagactttctgttctgtctgccatgggtttgtccagctcaggtagctctaggagcaccatcctgccctagcagagcccaggccttgccctcatgaagcatcattgaaatagcaggagcatgttgatttcttggttaggttgcattataataacaagagtcagaacattaattcgaaacaacttgcagtatgcatttcttcacaccagtacattcttaagtgtacttgtttataaggaataacataaactaatctgtacctttatatatatgtgtgtgtacatatatacatatataaactgtatagtgtacatggtaatgatttattgctatgccccagatccttaatgtagttctcatcctccgcatgccctcagccacaagcgggtgactgactgttccctgatgatttggcccacctcctgtgtttggacctctagggaggagggttttggtcatactctccttatcctcgtgcacagaaatgctcagggtccccatgtgcctgttgttcagccctctctcttgttccctttctgagcatgtggtccttccccaggctgtgggacagctgccttcccacgaaagtgtaaagcagtattaagatcattactgcatgtgccctaaaaacccaagttttctattcccttaggacagaaaattgcatgtgaggtgggataatcgagtttcagtgacccacgtcagttacacattaaagccagaccccatgataaaattccacaaaatggaaataaaactcaaatttctttagcattgtgtaaataaatctgaatgtgtttaactttgtactggtaattttctgtatatttggaatatttgggttaaaaataaaacagactggactttgttacctgacctac

SEQ ID NO: 178 - protein, 831 aa, Homo sapiens
MERPWGAADGLSRWPHGLGLLLLLQLLPPSTLSQDRLDAPPPPAAPLPRWSGPIGVSWGLRAAAAGGAFPRGGRWRRSAPGEDEECGRVRDFVAKLANNTHQHVFDDLRGSVSLSWVGDSTGVILVLTTFHVPLVIMTFGQSKLYRSEDYGKNFKDITDLINNTFIRTEFGMAIGPENSGKVVLTAEVSGGSRGGRIFRSSDFAKNFVQTDLPFHPLTQMMYSPQNSDYLLALSTENGLWVSKNFGGKWEEIHKAVCLAKWGSDNTIFFTTYANGSCKADLGALELWRTSDLGKSFKTIGVKIYSFGLGGRFLFASVMADKDTTRRIHVSTDQGDTWSMAQLPSVGQEQFYSILAANDDMVFMHVDEPGDTGFGTIFTSDDRGIVYSKSLDRHLYTTTGGETDFTNVTSLRGVYITSVLSEDNSIQTMITFDQGGRWTHLRKPENSECDATAKNKNECSLHIHASYSISQKLNVPMAPLSEPNAVGIVIAHGSVGDAISVMVPDVYISDDGGYSWTKMLEGPHYYTILDSGGIIVAIEHSSRPINVIKFSTDEGQCWQTYTFTRDPIYFTGLASEPGARSMNISIWGFTESFLTSQWVSYTIDFKDILERNCEEKDYTIWLAHSTDPEDYEDGCILGYKEQFLRLRKSSVCQNGRDYVVTKQPSICLCSLEDFLCDFGYYRPENDSKCVEQPELKGHDLEFCLYGREEHLTTNGYRKIPGDKCQGGVNPVREVKDLKKKCTSNFLSPEKQNSKSNSVPIILAIVGLMLVTVVAGVLIVKKYVCGGRFLVHRYSVLQQHAEANGVDGVDALDTASHTNKSGYHDDSDEDLLE

SEQ ID NO: 179 - DNA, 2272 bp, Homo sapiens
  CDS (234)..(1280)
attgctgtgtcaagttccagagaaaagcttctgttcgtccaagttactaaccaggctaaaccacatagacgtgaaggaaggggctagaaggaagggagtgccccactgttgatggggtaagaggatcctgtactgagaagttgaccagagagggtctcaccatgcgcacagttccttctgtacctgtgtggaggaaaagtactgagtgaagggcagaaaaagagaaaacagaaatgctctgcccttggagaactgctaacctagggctactgttgattttgactatcttcttagtggccgaagcggagggtgctgctcaaccaaacaactcattaatgctgcaaactagcaaggagaatcatgctttagcttcaagcagtttatgtatggatgaaaaacagattacacagaactactcgaaagtactcgcagaagttaacacttcatggcctgtaaagatggctacaaatgctgtgctttgttgccctcctatcgcattaagaaatttgatcataataacatgggaaataatcctgagaggccagccttcctgcacaaaagcctacaagaaagaaacaaatgagaccaaggaaaccaactgtactgatgagagaataacctgggtctccagacctgatcagaattcggaccttcagattcgtaccgtggccatcactcatgacgggtattacagatgcataatggtaacacctgatgggaatttccatcgtggatatcacctccaagtgttagttacacctgaagtgaccctgtttcaaaacaggaatagaactgcagtatgcaaggcagttgcagggaagccagctgcgcatatctcctggatcccagagggcgattgtgccactaagcaagaatactggagcaatggcacagtgactgttaagagtacatgccactgggaggtccacaatgtgtctaccgtgacctgccacgtctcccatttgactggcaacaagagtctgtacatagagctacttcctgttccaggtgccaaaaaatcagcaaaattatatattccatatatcatccttactattattattttgaccatcgtgggattcatttggttgttgaaagtcaatggctgcagaaaatataaattgaataaaacagaatctactccagttgttgaggaggatgaaatgcagccctatgccagctacacagagaagaacaatcctctctatgatactacaaacaaggtgaaggcatctgaggcattacaaagtgaagttgacacagacctccatactttataagttgttggactctagtaccaagaaacaacaacaaacgagatacattataattactgtctgattttcttacagttctagaatgaagacttatattgaaattaggttttccaaggttcttagaagacattttaatggattctcattcatacccttgtataattggaatttttgattcttagctgctaccagctagttctctgaagaactgatgttattacaaagaaaatacatgcccatgaccaaatattcaaattgtgcaggacagtaaataatgaaaaccaaatttcctcaagaaataactgaagaaggagcaagtgtgaacagtttcttgtgtatcctttcagaatattttaatgtacatatgacatgtgtatatgcctatggtatatgtgtcaatttatgtgtccccttacatatacatgcacatatctttgtcaaggcaccagtgggaacaatacactgcattactgttctatacatatgaaaacctaataatataagtcttagagatcattttatatcatgacaagtagagctacctcattctttttaatggttatataaaattccattgtatagttatatcattatttaattaaaaacaaccctaatgatggatatttagattcttttaagttttgtttatttcttttaagttttgtttgtggtataaacaataccacatagaatgtttcttgtgcatatatctctttgtttttgagtatatctgtaggataactttcttgagtggaattgtcaggtcaaagggtttgtgcattttactattgatatatatgttaaattgtgtcaaatatatatgtcaaattccctccaacattgtttaaatgtgcctttccctaaatttctattttaataactgtactattcctgcttctacagttgccactttctctttttaatcaaccagattaaatatgatgtgagattataataagaattatactatttaataaaaatggatttatattttt

SEQ ID NO: 180 - protein, 348 aa, Homo sapiens
MLCPWRTANLGLLLILTIFLVAEAEGAAQPNNSLMLQTSKENHALASSSLCMDEKQITQNYSKVLAEVNTSWPVKMATNAVLCCPPIALRNLIIITWEIILRGQPSCTKAYKKETNETKETNCTDERITWVSRPDQNSDLQIRTVAITHDGYYRCIMVTPDGNFHRGYHLQVLVTPEVTLFQNRNRTAVCKAVAGKPAAHISWIPEGDCATKQEYWSNGTVTVKSTCHWEVHNVSTVTCHVSHLTGNKSLYIELLPVPGAKKSAKLYIPYIILTIIILTIVGFIWLLKVNGCRKYKLNKTESTPVVEEDEMQPYASYTEKNNPLYDTTNKVKASEALQSEVDTDLHTL

SEQ ID NO: 181 - DNA, 1025 bp, Homo sapiens
  CDS (234)..(800)
attgctgtgtcaagttccagagaaaagcttctgttcgtccaagttactaaccaggctaaaccacatagacgtgaaggaaggggctagaaggaagggagtgccccactgttgatggggtaagaggatcctgtactgagaagttgaccagagagggtctcaccatgcgcacagttccttctgtacctgtgtggaggaaaagtactgagtgaagggcagaaaaagagaaaacagaaatgctctgcccttggagaactgctaacctagggctactgttgattttgactatcttcttagtggccgaagcggagggtgctgctcaaccaaacaactcattaatgctgcaaactagcaaggagaatcatgctttagcttcaagcagtttatgtatggatgaaaaacagattacacagaactactcgaaagtactcgcagaagttaacacttcatggcctgtaaagatggctacaaatgctgtgctttgttgccctcctatcgcattaagaaatttgatcataataacatgggaaataatcctgagaggccagccttcctgcacaaaagcctacaagaaagaaacaaatgagaccaaggaaaccaactgtactgatgagagaataacctgggtctccagacctgatcagaattcggaccttcagattcgtaccgtggccatcactcatgacgggtattacagatgcataatggtaacacctgatgggaatttccatcgtggatatcacctccaagtgttaggtaaggagcatcatatattgaggtatttcacatcaccagatttgtgacggaaacaaatgtctctctgaattccatatgctttatgtgaaaaccgaagcatttttttccctctttcctctctgcagttacacctgaagtgaccctgtttcaaaacaggaatagaactgcagtatgcaaggcagttgcagggaagccagctgcgcatatctcctggatcccagagggcgattgtgccactaagcaagaatactggagcaatggcacagtgactg

SEQ ID NO: 182 - protein, 188 aa, Homo sapiens
MLCPWRTANLGLLLILTIFLVAEAEGAAQPNNSLMLQTSKENHALASSSLCMDEKQITQNYSKVLAEVNTSWPVKMATNAVLCCPPIALRNLIIITWEIILRGQPSCTKAYKKETNETKETNCTDERITWVSRPDQNSDLQIRTVAITHDGYYRCIMVTPDGNFHRGYHLQVLGKEHHILRYFTSPDL

SEQ ID NO: 183 - DNA, 956 bp, Homo sapiens
  CDS (234)..(731)
attgctgtgtcaagttccagagaaaagcttctgttcgtccaagttactaaccaggctaaaccacatagacgtgaaggaaggggctagaaggaagggagtgccccactgttgatggggtaagaggatcctgtactgagaagttgaccagagagggtctcaccatgcgcacagttccttctgtacctgtgtggaggaaaagtactgagtgaagggcagaaaaagagaaaacagaaatgctctgcccttggagaactgctaacctagggctactgttgattttgactatcttcttagtggccgcttcaagcagtttatgtatggatgaaaaacagattacacagaactactcgaaagtactcgcagaagttaacacttcatggcctgtaaagatggctacaaatgctgtgctttgttgccctcctatcgcattaagaaatttgatcataataacatgggaaataatcctgagaggccagccttcctgcacaaaagcctacaagaaagaaacaaatgagaccaaggaaaccaactgtactgatgagagaataacctgggtctccagacctgatcagaattcggaccttcagattcgtaccgtggccatcactcatgacgggtattacagatgcataatggtaacacctgatgggaatttccatcgtggatatcacctccaagtgttaggtaaggagcatcatatattgaggtatttcacatcaccagatttgtgacggaaacaaatgtctctctgaattccatatgctttatgtgaaaaccgaagcatttttttccctctttcctctctgcagttacacctgaagtgaccctgtttcaaaacaggaatagaactgcagtatgcaaggcagttgcagggaagccagctgcgcatatctcctggatcccagagggcgattgtgccactaagcaagaatactggagcaatggcacagtgactg

SEQ ID NO: 184 - protein, 165 aa, Homo sapiens
MLCPWRTANLGLLLILTIFLVAASSSLCMDEKQITQNYSKVLAEVNTSWPVKMATNAVLCCPPIALRNLIIITWEIILRGQPSCTKAYKKETNETKETNCTDERITWVSRPDQNSDLQIRTVAITHDGYYRCIMVTPDGNFHRGYHLQVLGKEHHILRYFTSPDL

SEQ ID NO: 185 - DNA, 2203 bp, Homo sapiens
  CDS (234)..(1211)
attgctgtgtcaagttccagagaaaagcttctgttcgtccaagttactaaccaggctaaaccacatagacgtgaaggaaggggctagaaggaagggagtgccccactgttgatggggtaagaggatcctgtactgagaagttgaccagagagggtctcaccatgcgcacagttccttctgtacctgtgtggaggaaaagtactgagtgaagggcagaaaaagagaaaacagaaatgctctgcccttggagaactgctaacctagggctactgttgattttgactatcttcttagtggccgcttcaagcagtttatgtatggatgaaaaacagattacacagaactactcgaaagtactcgcagaagttaacacttcatggcctgtaaagatggctacaaatgctgtgctttgttgccctcctatcgcattaagaaatttgatcataataacatgggaaataatcctgagaggccagccttcctgcacaaaagcctacaagaaagaaacaaatgagaccaaggaaaccaactgtactgatgagagaataacctgggtctccagacctgatcagaattcggaccttcagattcgtaccgtggccatcactcatgacgggtattacagatgcataatggtaacacctgatgggaatttccatcgtggatatcacctccaagtgttagttacacctgaagtgaccctgtttcaaaacaggaatagaactgcagtatgcaaggcagttgcagggaagccagctgcgcatatctcctggatcccagagggcgattgtgccactaagcaagaatactggagcaatggcacagtgactgttaagagtacatgccactgggaggtccacaatgtgtctaccgtgacctgccacgtctcccatttgactggcaacaagagtctgtacatagagctacttcctgttccaggtgccaaaaaatcagcaaaattatatattccatatatcatccttactattattattttgaccatcgtgggattcatttggttgttgaaagtcaatggctgcagaaaatataaattgaataaaacagaatctactccagttgttgaggaggatgaaatgcagccctatgccagctacacagagaagaacaatcctctctatgatactacaaacaaggtgaaggcatctgaggcattacaaagtgaagttgacacagacctccatactttataagttgttggactctagtaccaagaaacaacaacaaacgagatacattataattactgtctgattttcttacagttctagaatgaagacttatattgaaattaggttttccaaggttcttagaagacattttaatggattctcattcatacccttgtataattggaatttttgattcttagctgctaccagctagttctctgaagaactgatgttattacaaagaaaatacatgcccatgaccaaatattcaaattgtgcaggacagtaaataatgaaaaccaaatttcctcaagaaataactgaagaaggagcaagtgtgaacagtttcttgtgtatcctttcagaatattttaatgtacatatgacatgtgtatatgcctatggtatatgtgtcaatttatgtgtccccttacatatacatgcacatatctttgtcaaggcaccagtgggaacaatacactgcattactgttctatacatatgaaaacctaataatataagtcttagagatcattttatatcatgacaagtagagctacctcattctttttaatggttatataaaattccattgtatagttatatcattatttaattaaaaacaaccctaatgatggatatttagattcttttaagttttgtttatttcttttaagttttgtttgtggtataaacaataccacatagaatgtttcttgtgcatatatctctttgtttttgagtatatctgtaggataactttcttgagtggaattgtcaggtcaaagggtttgtgcattttactattgatatatatgttaaattgtgtcaaatatatatgtcaaattccctccaacattgtttaaatgtgcctttccctaaatttctattttaataactgtactattcctgcttctacagttgccactttctctttttaatcaaccagattaaatatgatgtgagattataataagaattatactatttaataaaaatggatttatattttt

SEQ ID NO: 186 - protein, 325 aa, Homo sapiens
MLCPWRTANLGLLLILTIFLVAASSSLCMDEKQITQNYSKVLAEVNTSWPVKMATNAVLCCPPIALRNLIIITWEIILRGQPSCTKAYKKETNETKETNCTDERITWVSRPDQNSDLQIRTVAITHDGYYRCIMVTPDGNFHRGYHLQVLVTPEVTLFQNRNRTAVCKAVAGKPAAHISWIPEGDCATKQEYWSNGTVTVKSTCHWEVHNVSTVTCHVSHLTGNKSLYIELLPVPGAKKSAKLYIPYIILTIIILTIVGFIWLLKVNGCRKYKLNKTESTPVVEEDEMQPYASYTEKNNPLYDTTNKVKASEALQSEVDTDLHTL

SEQ ID NO: 187 - DNA, 2813 bp, Homo sapiens
  CDS (94)..(1755)
cggggctcgaggctgctggagtcgctcgctgactcgccctgcgccctcgccgcggacaccggagctgcggccgctccccgctgtcccccagagatggcagatcctgaggtagttgtgagtagctgcagctctcatgaagaggaaaatcgctgcaattttaaccagcaaacatctccatctgaggagcttctattagaagaccagatgaggcgaaaactcaaattttttttcatgaatccctgtgagaagttctgggctcgaggtagaaaaccatggaaacttgccatacaaattctaaaaattgcaatggtgactatccagctggtcttatttgggctaagtaaccagatggtggtagctttcaaggaagagaatactatagcattcaaacaccttttcctaaaaggatatatggaccgaatggatgacacatatgcagtgtacacacaaagtgacgtgtatgatcagttaatcttcgcagtaaaccagtacttgcagctatacaatgtctccgttgggaatcatgcttatgagaacaaaggtaccaagcaatctgctatggcaatctgtcagcacttctacaagcgaggaaacatctaccctggaaatgatacctttgacatcgatccagaaattgaaactgagtgtttctttgtggagccagatgaaccttttcacattgggacaccagcagaaaataaactgaacttaacactggacttccacagactcctaacagtggagcttcagtttaaactgaaagccattaatctgcagacagttcgtcatcaagaactccctgactgttatgactttactctgactataacatttgacaacaaggcccatagtggaagaattaaaataagtttagataatgacatttccatcagagaatgtaaagactggcatgtatctggatcaattcagaagaacactcattacatgatgatctttgatgcctttgtcattctgacttgcttggtttcattaatcctctgcattagatctgtgattagaggacttcagcttcagcaggagtttgtcaattttttcctcctccattataagaaggaagtttctgtttctgatcaaatggaatttgtcaatggatggtacattatgattattattagtgacatattgacaatcattggatcaattctaaaaatggaaatccaagctaagagtctaactagttatgatgtctgtagcatacttcttgggacttctaccatgctcgtgtggcttggagtcatccgatacctcggtttctttgcaaagtacaacctcctcattttgacccttcaggcagcgctgcccaatgtcatcaggttctgctgctgtgcagctatgatttacttaggttactgcttctgtggatggatcgtgctggggccttaccatgacaagtttcgttctctgaacatggtctctgagtgccttttctctctgataaatggagatgatatgtttgccacgtttgcaaaaatgcagcaaaaaagttacttagtctggctgtttagtagaatttacctctactcattcatcagcctctttatatatatgattttaagtcttttcattgcactgatcactgatacatacgaaacaattaagcaataccaacaagatggcttcccagagactgaacttcgtacatttatatcagaatgcaaagatctacccaactctggaaaatacagattagaagatgaccctccagtatctttattctgctgttgtaaaaagtagctatcaggtttatctgtactttagaggaaaatataatgtgtagctgagttggaacactgtggatattctgagatcagatgtagtatgtttgaagactgttattttgagctaattgagacctataattcaccaataactgtttatatttttaaaagcaatatttaatgtctttgcaactttatgctgggattgtttttaaaaaaactttaatgaggaaagctattggattattattatttcttgtttattttgccatggctttagaatgtattctgtatgcctctcttttgctctgatactgttgctcctgctattctgattgtgcagactgtgtaattagtggaaaacaatccttggtctgactgtgactttggacaactcagtaaccctggcttggaccactctcaggagtccatccttgagagagtgggtgtagttatcatttatacagtaatcattgcattttaaaatcttctcttgaaaggaagaataagagtgcaccagaataagagcgcaccagaataagagcgcaccagctaacaatgtgatacggccatatgtcacttaaggatggagatatgttctgagaaatgtgtcattaggcgattttgtcattaaacatcatagcatgtacttccacaaacctagatggtatagcctactacacacctaggctatttggtatagcctgttggtcctggggtacaaatctgtacaacatgttactgtattgaatacagtaggcaattgtaacacaatggtaagtatctaaacatagaaaagggacagtaaaaatatggttttataatcttctgggaccaccattgtatatgcggtacatcattgaccaaaacatcgttatccagcatatgactgtatttggttatgaaagccaactgttacttgattctgcttttagttcttaagaggatcaggcttttaaatactcatttacaagttttctatcctccttcagtgttaaagtagaaagtaaaaagagtatcttatacatgcatgaaattaaagcatataccaaatgcaaaaaaaaaaaaaaaaaa

SEQ ID NO: 188 - protein, 553 aa, Homo sapiens
MADPEVVVSSCSSHEEENRCNFNQQTSPSEELLLEDQMRRKLKFFFMNPCEKFWARGRKPWKLAIQILKIAMVTIQLVLFGLSNQMVVAFKEENTIAFKHLFLKGYMDRMDDTYAVYTQSDVYDQLIFAVNQYLQLYNVSVGNHAYENKGTKQSAMAICQHFYKRGNIYPGNDTFDIDPEIETECFFVEPDEPFHIGTPAENKLNLTLDFHRLLTVELQFKLKAINLQTVRHQELPDCYDFTLTITFDNKAHSGRIKISLDNDISIRECKDWHVSGSIQKNTHYMMIFDAFVILTCLVSLILCIRSVIRGLQLQQEFVNFFLLHYKKEVSVSDQMEFVNGWYIMIIISDILTIIGSILKMEIQAKSLTSYDVCSILLGTSTMLVWLGVIRYLGFFAKYNLLILTLQAALPNVIRFCCCAAMIYLGYCFCGWIVLGPYHDKFRSLNMVSECLFSLINGDDMFATFAKMQQKSYLVWLFSRIYLYSFISLFIYMILSLFIALITDTYETIKQYQQDGFPETELRTFISECKDLPNSGKYRLEDDPPVSLFCCCKK

SEQ ID NO: 189 - DNA, 3207 bp, Homo sapiens
  CDS (63)..(728)
tgccgctccccgcgctcgtagcgcgggcctggggactggggatcccgccgccgggccgcagcatggggcgcttccgcgggggcctgcggtgcatcaagtacctgctgcttggcttcaacctgctcttctggctggctggatcggccgtcattgcttttggactatggtttcggttcggaggtgccataaaggagttatcatcagaggacaagtccccagagtatttctatgtggggctgtatgttctggttggagccggggccctgatgatggccgtggggttcttcgggtgctgcggagccatgcgggagtcgcaatgtgtgcttggatcattttttacctgcctcctggtgatatttgctgctgaagtaaccactggagtatttgcttttataggcaagggggtagctatccgacatgttcagaccatgtatgaagaggcttacaatgattaccttaaagacaggggaaaaggcaatgggacactcatcaccttccactcaacatttcagtgctgtggaaaagaaagctccgaacaggtccaacctacatgcccaaaggagcttctaggacacaagaattgcatcgatgaaattgagaccataatcagtgttaagctccagctcattggaattgtcggtattggaattgcaggtctgacgatctttggcatgatattcagcatggtcctctgctgtgcgatacgaaactcacgagatgtgatatgaagctacttctacatgaaaattgcaatctaaagctttcataccaaatgtcacaggagctgtctcccagctcatttttaacactgaaatgacattaggatctaaaataatttgctgtcaattgtacatttgcatgagtacgtatgtttggctcattactggtttaccccttgagtgaatgcctgtttatgatgactgagagcatattcatgtgtgatctgcgtgtttctggaatatgctttatacgtaatgaaatctgtttgctgggaattcctgattcttgttatataagaagaacaacctatttcgctcccagaaaaaaaagatcaaagagctttcagaaactttgagaacttggctatttagaaaaagtgataatgggtcagtttctcagactgtagccattgaaaattagatgcagagaattcagagatttcttcttaatggaagtaataagctgtaagaattgagagatcacaatggagtgttaaaactgactgtgtctaagttgggtgtaagggtttcctgggtttttttatatacatgctctccccagaatacagtaaaccacagttttagaactaaacacatctgtaaaactaaatatagcatggaaaatccaatttgaataagtcatgctttcctagaatttaaaaataaaaaagtcttcctctggaaagagaagtcacacagacaatcatgtgccctataaaagtgagtgtttataggactaaaaaacttttaacaactttttaaggaaatatttttgttcttatacaaaaacatgtaaatattgctttattactttcattttctgaccctgctgtaaactactgcaaccctcacatcctcaaagggacttttatgtcaaactcttctgtttctccaaatataaggaaaaaagactaaagcaagagatctggcagttgaaaattgtgggaaagagaatttgtatgggcactgtatctatgaaatacctcataacttacgtttacatgttttcctaactttttgtatttttcttgtatagccacctagagaattcttcatagattaagaactacagttttcaccacttaacataagtaaaacaaagtccttcataatttaaccattagcatctttggccaaaccaaaataaagaaaagcatcttctcctagttgtgtgtgggcaacagaaacaagttaaggaaacaaaaatacttatatatacacagaacaaaaataatgttctttttatgcaaatcccctgtgaaaataaaattttcaatgtttttttggtcttaacgcttcattttaacttagtaaacccaaatttaggatttacattggcaaatttttcagtgatttttaacgtgttacatttagtaaaccatagattttttaaaaactacattttgtaaggccacacataagtgaaaatacggaaggctttggaaacccccagatgaacttctatacatgtgaaaacacaagtctttgagtgtgcactaaaagtgtcacactcccaaaaaactcacaaaacattttgctaaaaagatatgactgcttgaaatagtctctctcccatggagaaccacatttctctttctgccatacttgctactgctactgattttggaggaaatttttctagaagaacaaaggtcatatttgaggcaagctaaaaacttaattatacatggctactttactgtgtctgtagctaaagaaaaattattttacaaaaattacttcatgaaatatagtttgtaccccagtagttgagaaatgtgaccttttaggcaaagaacaggcagtccatctctcttagctttagtttatctctctgcctgaagacaggaaacaggcccaagtgcatactcgggttctttccaactcagaatcatctctgattccacaaaagtgagtttagtttcctatctgaattaacaactttaaaggagactataatagttaaaagtggaagaatagaaataaataaatttaaaatgaaattaattaaagtagaagagaagggttctgttccatgtacgattaatgtgccccttttggagataagctttccaaaatatgcgtatgagtaaaattagagaattccaccactaagcaacaatagattttatatgtgtgtgtggatatatatacacacacacacagaaagatgaatatatatatatatatatctgtatagacacacatataatatatatagatatataatccctatatatcttgaatctacaaatatctttatatgtatataatttgaatatatacatgtatgtatatacagatgtgtgtgtatatatatatatacatacacatatacataaattttcagctatttctgttcccctgaactaatttgagattagacccaaacatgcttttaaatgtctcatgccaaggcactgaattaagacttcttaatgttgaaatattttaagtgatttcatattaaattttctatatactgaaa

SEQ ID NO: 190 - protein, 221 aa, Homo sapiens
MGRFRGGLRCIKYLLLGFNLLFWLAGSAVIAFGLWFRFGGAIKELSSEDKSPEYFYVGLYVLVGAGALMMAVGFFGCCGAMRESQCVLGSFFTCLLVIFAAEVTTGVFAFIGKGVAIRHVQTMYEEAYNDYLKDRGKGNGTLITFHSTFQCCGKESSEQVQPTCPKELLGHKNCIDEIETIISVKLQLIGIVGIGIAGLTIFGMIFSMVLCCAIRNSRDVI

SEQ ID NO: 191 - DNA, 847 bp, Homo sapiens
  CDS (48)..(449)
cgtcagtctagaaggataagagaaagaaagttaagcaactacaggaaatggctttgggagttccaatatcagtctatcttttattcaacgcaatgacagcactgaccgaagaggcagccgtgactgtaacacctccaatcacagcccagcaagctgacaacatagaaggacccatagccttgaagttctcacacctttgcctggaagatcataacagttactgcatcaacggtgcttgtgcattccaccatgagctagagaaagccatctgcaggtgttttactggttatactggagaaaggtgtgagcacttgactttaacttcatatgctgtggattcttatgaaaaatacattgcaattgggattggtgttggattactattaagtggttttcttgttattttttactgctatataagaaagaggtatgaaaaagacaaaatatgaagtcacttcatatgcaatcgtttgacaaatagttattcaggccctataatgtgtcaggcactgacatgtaaaatttttttaattaaaaaagagctgtaatctggcaaaaagtttctatgtaatatttttcatgccttttctcataaacccagacgagtggtaaaaatttgccttcagttgtaataggagagttcaaacgtacagtctcccttcaacctatctctgtctgcccatatcaaaattataaatgaggaggacagcaggccccaagaaagtagggactaagtatgtcttgttcaaaattgtatattcagtgacttacactatgcctagcacacaacacacactgagtaaatatttgttgagtgaaataaaatcaagaaacaagtaaaaactga

SEQ ID NO: 192 - protein, 133 aa, Homo sapiens
MALGVPISVYLLFNAMTALTEEAAVTVTPPITAQQADNIEGPIALKFSHLCLEDHNSYCINGACAFHHELEKAICRCFTGYTGERCEHLTLTSYAVDSYEKYIAIGIGVGLLLSGFLVIFYCYIRKRYEKDKI

SEQ ID NO: 193 - DNA, 1638 bp, Homo sapiens
  CDS (417)..(1271)
tcagcgggaggggctggaccccgcgttcctcctccctgccggtccccatccttaaagcgagagtctggacgccccgcctgtgggagagagcgccgggatccggacggggagcaaccggggcaggccgtgccggctgaggaggtcctgaggctacagagctgccgcggctggcacacgagcgcctcggcactaaccgagtgttcgcgggggctgtgaggggagggccccgggcgccattgctggcggtgggagcgccgcccggtctcagcccgccctcggctgctctcctcctccggctgggaggggccgtagctcggggccgtcgccagccccggcccgggctcgagaatcaagggcctcggccgccgtcccgcagctcagtccatcgcccttgccgggcagcccgggcagagaccatgtttgacaagacgcggctgccgtacgtggccctcgatgtgctctgcgtgttgctggctggattgccttttgcaattcttacttcaaggcatacccccttccaacgaggagtattctgtaatgatgagtccatcaagtacccttacaaagaagacaccataccttatgcgttattaggtggaataatcattccattcagtattatcgttattattcttggagaaaccctgtctgtttactgtaaccttttgcactcaaattcctttatcaggaataactacatagccactatttacaaagccattggaacctttttatttggtgcagctgctagtcagtccctgactgacattgccaagtattcaataggcagactgcggcctcacttcttggatgtttgtgatccagattggtcaaaaatcaactgcagcgatggttacattgaatactacatatgtcgagggaatgcagaaagagttaaggaaggcaggttgtccttctattcaggccactcttcgttttccatgtactgcatgctgtttgtggcactttatcttcaagccaggatgaagggagactgggcaagactcttacgccccacactgcaatttggtcttgttgccgtatccatttatgtgggcctttctcgagtttctgattataaacaccactggagcgatgtgttgactggactcattcagggagctctggttgcaatattagttgctgtatatgtatcggatttcttcaaagaaagaacttcttttaaagaaagaaaagaggaggactctcatacaactctgcatgaaacaccaacaactgggaatcactatccgagcaatcaccagccttgaaaggcagcagggtgcccaggtgaagctggcctgttttctaaaggaaaatgattgccacaaggcaagaggatgcatctttcttcctggtgtacaagcctttaaagacttctgctgctgctatgcctcttggatgcacactttgtgtgtacatagttacctttaactcagtggttatctaatagctctaaactcattaaaaaaactccaagccttccaccaaaacagtgccccacctgtatacatttttattaaaaaaatgtaatgcttatgtataaacatgtatgtaatatgctttctatgaatgatgtttgatttaaatataatacatattaaaatgtatgggagaaccaaaaaaaaaaaaaaaaaa

SEQ ID NO: 194 - protein, 284 aa, Homo sapiens
MFDKTRLPYVALDVLCVLLAGLPFAILTSRHTPFQRGVFCNDESIKYPYKEDTIPYALLGGIIIPFSIIVIILGETLSVYCNLLHSNSFIRNNYIATIYKAIGTFLFGAAASQSLTDIAKYSIGRLRPHFLDVCDPDWSKINCSDGYIEYYICRGNAERVKEGRLSFYSGHSSFSMYCMLFVALYLQARMKGDWARLLRPTLQFGLVAVSIYVGLSRVSDYKHHWSDVLTGLIQGALVAILVAVYVSDFFKERTSFKERKEEDSHTTLHETPTTGNHYPSNHQP

SEQ ID NO: 195 - DNA, 1641 bp, Homo sapiens
  CDS (417)..(1274)
tcagcgggaggggctggaccccgcgttcctcctccctgccggtccccatccttaaagcgagagtctggacgccccgcctgtgggagagagcgccgggatccggacggggagcaaccggggcaggccgtgccggctgaggaggtcctgaggctacagagctgccgcggctggcacacgagcgcctcggcactaaccgagtgttcgcgggggctgtgaggggagggccccgggcgccattgctggcggtgggagcgccgcccggtctcagcccgccctcggctgctctcctcctccggctgggaggggccgtagctcggggccgtcgccagccccggcccgggctcgagaatcaagggcctcggccgccgtcccgcagctcagtccatcgcccttgccgggcagcccgggcagagaccatgtttgacaagacgcggctgccgtacgtggccctcgatgtgctctgcgtgttgctggcttccatgcctatggctgttctaaaattgggccaaatatatccatttcagagaggctttttctgtaaagacaacagcatcaactatccgtaccatgacagtaccgtcacatccactgtcctcatcctagtgggggttggcttgcccatttcctctattattcttggagaaaccctgtctgtttactgtaaccttttgcactcaaattcctttatcaggaataactacatagccactatttacaaagccattggaacctttttatttggtgcagctgctagtcagtccctgactgacattgccaagtattcaataggcagactgcggcctcacttcttggatgtttgtgatccagattggtcaaaaatcaactgcagcgatggttacattgaatactacatatgtcgagggaatgcagaaagagttaaggaaggcaggttgtccttctattcaggccactcttcgttttccatgtactgcatgctgtttgtggcactttatcttcaagccaggatgaagggagactgggcaagactcttacgccccacactgcaatttggtcttgttgccgtatccatttatgtgggcctttctcgagtttctgattataaacaccactggagcgatgtgttgactggactcattcagggagctctggttgcaatattagttgctgtatatgtatcggatttcttcaaagaaagaacttcttttaaagaaagaaaagaggaggactctcatacaactctgcatgaaacaccaacaactgggaatcactatccgagcaatcaccagccttgaaaggcagcagggtgcccaggtgaagctggcctgttttctaaaggaaaatgattgccacaaggcaagaggatgcatctttcttcctggtgtacaagcctttaaagacttctgctgctgctatgcctcttggatgcacactttgtgtgtacatagttacctttaactcagtggttatctaatagctctaaactcattaaaaaaactccaagccttccaccaaaacagtgccccacctgtatacatttttattaaaaaaatgtaatgcttatgtataaacatgtatgtaatatgctttctatgaatgatgtttgatttaaatataatacatattaaaatgtatgggagaaccaaaaaaaaaaaaaaaaaa

SEQ ID NO: 196 - protein, 285 aa, Homo sapiens
MFDKTRLPYVALDVLCVLLASMPMAVLKLGQIYPFQRGFFCKDNSINYPYHDSTVTSTVLILVGVGLPISSIILGETLSVYCNLLHSNSFIRNNYIATIYKAIGTFLFGAAASQSLTDIAKYSIGRLRPHFLDVCDPDWSKINCSDGYIEYYICRGNAERVKEGRLSFYSGHSSFSMYCMLFVALYLQARMKGDWARLLRPTLQFGLVAVSIYVGLSRVSDYKHHWSDVLTGLIQGALVAILVAVYVSDFFKERTSFKERKEEDSHTTLHETPTTGNHYPSNHQP

SEQ ID NO: 197 - DNA, 1957 bp, Homo sapiens
  CDS (175)..(1359)
ctgtttgcatctctgcaaccacttcagaaggcacgtgtttggtttgctctgagcctaacctagagtgctcgcagcagtctttcagttgagcttggggactgcagctgtggggagatttcagtgcattgcctcccctgggtgctcttcatcttggatttgaaagttgagagcagcatgttttgcccactgaaactcatcctgctgccagtgttactggattattccttgggcctgaatgacttgaatgtttccccgcctgagctaacagtccatgtgggtgattcagctctgatgggatgtgttttccagagcacagaagacaaatgtatattcaagatagactggactctgtcaccaggagagcacgccaaggacgaatatgtgctatactattactccaatctcagtgtgcctattgggcgcttccagaaccgcgtacacttgatgggggacatcttatgcaatgatggctctctcctgctccaagatgtgcaagaggctgaccagggaacctatatctgtgaaatccgcctcaaaggggagagccaggtgttcaagaaggcggtggtactgcatgtgcttccagaggagcccaaagagctcatggtccatgtgggtggattgattcagatgggatgtgttttccagagcacagaagtgaaacacgtgaccaaggtagaatggatattttcaggacggcgcgcaaaggaggagattgtatttcgttactaccacaaactcaggatgtctgtggagtactcccagagctggggccacttccagaatcgtgtgaacctggtgggggacattttccgcaatgacggttccatcatgcttcaaggagtgagggagtcagatggaggaaactacacctgcagtatccacctagggaacctggtgttcaagaaaaccattgtgctgcatgtcagcccggaagagcctcgaacactggtgaccccggcagccctgaggcctctggtcttgggtggtaatcagttggtgatcattgtgggaattgtctgtgccacaatcctgctgctccctgttctgatattgatcgtgaagaagacctgtggaaataagagttcagtgaattctacagtcttggtgaagaacacgaagaagactaatccagagataaaagaaaaaccctgccattttgaaagatgtgaaggggagaaacacatttactccccaataattgtacgggaggtgatcgaggaagaagaaccaagtgaaaaatcagaggccacctacatgaccatgcacccagtttggccttctctgaggtcagatcggaacaactcacttgaaaaaaagtcaggtgggggaatgccaaaaacacagcaagccttttgagaagaatggagagtcccttcatctcagcagcggtggagactctctcctgtgtgtgtcctgggccactctaccagtgatttcagactcccgctctcccagctgtcctcctgtctcattgtttggtcaatacactgaagatggagaatttggagcctggcagagagactggacagctctggaggaacaggcctgctgaggggaggggagcatggacttggcctctggagtgggacactggccctgggaaccaggctgagctgagtggcctcaaaccccccgttggatcagaccctcctgtgggcagggttcttagtggatgagttactgggaagaatcagagataaaaaccaacccaaatcattcctctggcacattatttctaaataagtgttgtttgtggaaatcgtcctatttttatgcctcggttgagggggcaagtaaagtcctggtgaggaatttacagttagaaacttttggaaaaactgaagttcctggaggaaagccaaaccgtgctaacacactagaggctggttttggtcctgggaaaggtttggggtgaatgggttggaagtagggtatgaatacagttttgggattt

SEQ ID NO: 198 - protein, 394 aa, Homo sapiens
MFCPLKLILLPVLLDYSLGLNDLNVSPPELTVHVGDSALMGCVFQSTEDKCIFKIDWTLSPGEHAKDEYVLYYYSNLSVPIGRFQNRVHLMGDILCNDGSLLLQDVQEADQGTYICEIRLKGESQVFKKAVVLHVLPEEPKELMVHVGGLIQMGCVFQSTEVKHVTKVEWIFSGRRAKEEIVFRYYHKLRMSVEYSQSWGHFQNRVNLVGDIFRNDGSIMLQGVRESDGGNYTCSIHLGNLVFKKTIVLHVSPEEPRTLVTPAALRPLVLGGNQLVIIVGIVCATILLLPVLILIVKKTCGNKSSVNSTVLVKNTKKTNPEIKEKPCHFERCEGEKHIYSPIIVREVIEEEEPSEKSEATYMTMHPVWPSLRSDRNNSLEKKSGGGMPKTQQAF

SEQ ID NO: 199 - DNA, 2195 bp, Homo sapiens
  CDS (443)..(1597)
atcacttggctcttctctgatatgaactgggcagcatctaaatgtatctttcttgattttgttgtctctttgcatagagcatatcttgtgaaaacagaaatatccatgtaatggttttttcttgtagtgaccgctcgaaattgcttgagcaacatagagataatgggcaggggtccctgtgtgaagcacctagaggctggaaagctgatggcaaagctggaggggtgaggcagggagaggataaacacagtggaaatgcaggaggaaagctgtgctctgtggtggcctaattacaaggacctgccctacagccagaatcagccagcaaatgcttttgtaaaggaactaaaagaaagggaaaagaggaagtaaacaaaaggtcccttttcagagagggaaccagtgggagatttaagagcaaggaacaacccatttcgtcgttatggtaagtggagattattccttgggcctgaatgacttgaatgtttccccgcctgagctaacagtccatgtgggtgattcagctctgatgggatgtgttttccagagcacagaagacaaatgtatattcaagatagactggactctgtcaccaggagagcacgccaaggacgaatatgtgctatactattactccaatctcagtgtgcctattgggcgcttccagaaccgcgtacacttgatgggggacatcttatgcaatgatggctctctcctgctccaagatgtgcaagaggctgaccagggaacctatatctgtgaaatccgcctcaaaggggagagccaggtgttcaagaaggcggtggtactgcatgtgcttccagaggagcccaaagagctcatggtccatgtgggtggattgattcagatgggatgtgttttccagagcacagaagtgaaacacgtgaccaaggtagaatggatattttcaggacggcgcgcaaaggaggagattgtatttcgttactaccacaaactcaggatgtctgtggagtactcccagagctggggccacttccagaatcgtgtgaacctggtgggggacattttccgcaatgacggttccatcatgcttcaaggagtgagggagtcagatggaggaaactacacctgcagtatccacctagggaacctggtgttcaagaaaaccattgtgctgcatgtcagcccggaagagcctcgaacactggtgaccccggcagccctgaggcctctggtcttgggtggtaatcagttggtgatcattgtgggaattgtctgtgccacaatcctgctgctccctgttctgatattgatcgtgaagaagacctgtggaaataagagttcagtgaattctacagtcttggtgaagaacacgaagaagactaatccagagataaaagaaaaaccctgccattttgaaagatgtgaaggggagaaacacatttactccccaataattgtacgggaggtgatcgaggaagaagaaccaagtgaaaaatcagaggccacctacatgaccatgcacccagtttggccttctctgaggtcagatcggaacaactcacttgaaaaaaagtcaggtgggggaatgccaaaaacacagcaagccttttgagaagaatggagagtcccttcatctcagcagcggtggagactctctcctgtgtgtgtcctgggccactctaccagtgatttcagactcccgctctcccagctgtcctcctgtctcattgtttggtcaatacactgaagatggagaatttggagcctggcagagagactggacagctctggaggaacaggcctgctgaggggaggggagcatggacttggcctctggagtgggacactggccctgggaaccaggctgagctgagtggcctcaaaccccccgttggatcagaccctcctgtgggcagggttcttagtggatgagttactgggaagaatcagagataaaaaccaacccaaatcattcctctggcacattatttctaaataagtgttgtttgtggaaatcgtcctatttttatgcctcggttgagggggcaagtaaagtcctggtgaggaatttacagttagaaacttttggaaaaactgaagttcctggaggaaagccaaaccgtgctaacacactagaggctggttttggtcctgggaaaggtttggggtgaatgggttggaagtagggtatgaatacagttttgggattt

SEQ ID NO: 200 - protein, 384 aa, Homo sapiens
MVSGDYSLGLNDLNVSPPELTVHVGDSALMGCVFQSTEDKCIFKIDWTLSPGEHAKDEYVLYYYSNLSVPIGRFQNRVHLMGDILCNDGSLLLQDVQEADQGTYICEIRLKGESQVFKKAVVLHVLPEEPKELMVHVGGLIQMGCVFQSTEVKHVTKVEWIFSGRRAKEEIVFRYYHKLRMSVEYSQSWGHFQNRVNLVGDIFRNDGSIMLQGVRESDGGNYTCSIHLGNLVFKKTIVLHVSPEEPRTLVTPAALRPLVLGGNQLVIIVGIVCATILLLPVLILIVKKTCGNKSSVNSTVLVKNTKKTNPEIKEKPCHFERCEGEKHIYSPIIVREVIEEEEPSEKSEATYMTMHPVWPSLRSDRNNSLEKKSGGGMPKTQQAF

SEQ ID NO: 201 - DNA, 2082 bp, Homo sapiens
  CDS (232)..(1509)
accagaggtttcccagagaggaaggcgtggctccctcccgggccagtgagccctggcgccgccgcggccgcggtcccagcagcggagtagggcggcggctgcgccccgcaccatggggggcagcccagccccagccgcggtaaacgccgacctccgccgccgcccgcgccgcgtctgccccctcccgctgcggctctctggacgccatcccctcctcacctcgaagccaacatgaaggagacccggggctacggaggggatgcccccttctgcacccgcctcaaccactcctacacaggcatgtgggcgcccgagcgttccgccgaggcgcggggcaacctcacgcgccctccagggtctggcgaggattgcggatcggtgtccgtggccttcccgatcaccatgctgctcactggtttcgtgggcaacgcactggccatgctgctcgtgtcgcgcagctaccggcgccgggagagcaagcgcaagaagtccttcctgctgtgcatcggctggctggcgctcaccgacctggtcgggcagcttctcaccaccccggtcgtcatcgtcgtgtacctgtccaagcagcgttgggagcacatcgacccgtcggggcggctctgcacctttttcgggctgaccatgactgttttcgggctctcctcgttgttcatcgccagcgccatggccgtcgagcgggcgctggccatcagggcgccgcactggtatgcgagccacatgaagacgcgtgccacccgcgctgtgctgctcggcgtgtggctggccgtgctcgccttcgccctgctgccggtgctgggcgtgggccagtacaccgtccagtggcccgggacgtggtgcttcatcagcaccgggcgagggggcaacgggactagctcttcgcataactggggcaaccttttcttcgcctctgcctttgccttcctggggctcttggcgctgacagtcaccttttcctgcaacctggccaccattaaggccctggtgtcccgctgccgggccaaggccacggcatctcagtccagtgcccagtggggccgcatcacgaccgagacggccattcagcttatggggatcatgtgcgtgctgtcggtctgctggtctccgctcctgataatgatgttgaaaatgatcttcaatcagacatcagttgagcactgcaagacacacacggagaagcagaaagaatgcaacttcttcttaatagctgttcgcctggcttcactgaaccagatcttggatccttgggtttacctgctgttaagaaagatccttcttcgaaagttttgccagatgagaaaaagaagactcagagagcaagctcctcttcttcccacctctactgtgattgatccttcaaggttctgtgctcagcccttccgttggttcttggatttgtcctttcccgccatgtcttcatcacatccacaacttccactaacacttgcgagcttcaaacttcttagagaaccctgcagtgtccagctaagctgatgacttgaagataaatctgcctaaccctgggatgaagtatctgtgaactattttgacagcagatgaggaattttggggaaattaaaacctgcctttctgccaggatcacatcactggaagctccatgactctctttttgtaaaagaaaaaaaaatcacagaaacacccacctcccaaactattctcttttacttcttcccccaagcccacccccaaatataactgttatccagaagctgttatgtcctgtttccatacatgtttttgtacttttactatatctacatacatcaattaaacttatgtcctattgttttgtgaatttatatttgcgtatacattatcatatgtaaaatttgcatttttttattgaaaattatgtttcttgagatttatccacattgaaacatggagctctaaatcgttaattttaaccgctatagagtattccataatttgaataaagcataatttgtttgtacaatctcccgccaagggaaaattatttccacactcatcatgacaaggagcactgcaaaaataaaaataaaaattacattcatacatgtttaa

SEQ ID NO: 202 - protein, 425 aa, Homo sapiens
MKETRGYGGDAPFCTRLNHSYTGMWAPERSAEARGNLTRPPGSGEDCGSVSVAFPITMLLTGFVGNALAMLLVSRSYRRRESKRKKSFLLCIGWLALTDLVGQLLTTPVVIVVYLSKQRWEHIDPSGRLCTFFGLTMTVFGLSSLFIASAMAVERALAIRAPHWYASHMKTRATRAVLLGVWLAVLAFALLPVLGVGQYTVQWPGTWCFISTGRGGNGTSSSHNWGNLFFASAFAFLGLLALTVTFSCNLATIKALVSRCRAKATASQSSAQWGRITTETAIQLMGIMCVLSVCWSPLLIMMLKMIFNQTSVEHCKTHTEKQKECNFFLIAVRLASLNQILDPWVYLLLRKILLRKFCQMRKRRLREQAPLLPTSTVIDPSRFCAQPFRWFLDLSFPAMSSSHPQLPLTLASFKLLREPCSVQLS

SEQ ID NO: 203 - DNA, 2011 bp, Homo sapiens
  CDS (232)..(1440)
accagaggtttcccagagaggaaggcgtggctccctcccgggccagtgagccctggcgccgccgcggccgcggtcccagcagcggagtagggcggcggctgcgccccgcaccatggggggcagcccagccccagccgcggtaaacgccgacctccgccgccgcccgcgccgcgtctgccccctcccgctgcggctctctggacgccatcccctcctcacctcgaagccaacatgaaggagacccggggctacggaggggatgcccccttctgcacccgcctcaaccactcctacacaggcatgtgggcgcccgagcgttccgccgaggcgcggggcaacctcacgcgccctccagggtctggcgaggattgcggatcggtgtccgtggccttcccgatcaccatgctgctcactggtttcgtgggcaacgcactggccatgctgctcgtgtcgcgcagctaccggcgccgggagagcaagcgcaagaagtccttcctgctgtgcatcggctggctggcgctcaccgacctggtcgggcagcttctcaccaccccggtcgtcatcgtcgtgtacctgtccaagcagcgttgggagcacatcgacccgtcggggcggctctgcacctttttcgggctgaccatgactgttttcgggctctcctcgttgttcatcgccagcgccatggccgtcgagcgggcgctggccatcagggcgccgcactggtatgcgagccacatgaagacgcgtgccacccgcgctgtgctgctcggcgtgtggctggccgtgctcgccttcgccctgctgccggtgctgggcgtgggccagtacaccgtccagtggcccgggacgtggtgcttcatcagcaccgggcgagggggcaacgggactagctcttcgcataactggggcaaccttttcttcgcctctgcctttgccttcctggggctcttggcgctgacagtcaccttttcctgcaacctggccaccattaaggccctggtgtcccgctgccgggccaaggccacggcatctcagtccagtgcccagtggggccgcatcacgaccgagacggccattcagcttatggggatcatgtgcgtgctgtcggtctgctggtctccgctcctgataatgatgttgaaaatgatcttcaatcagacatcagttgagcactgcaagacacacacggagaagcagaaagaatgcaacttcttcttaatagctgttcgcctggcttcactgaaccagatcttggatccttgggtttacctgctgttaagaaagatccttcttcgaaagttttgccagatgagaaaaagaagactcagagagcaagagatggggcctgatggaaggtgtttttgtcatgcatggaggcaggtccccaggacttggtgcagttctcatgatagagaaccctgcagtgtccagctaagctgatgacttgaagataaatctgcctaaccctgggatgaagtatctgtgaactattttgacagcagatgaggaattttggggaaattaaaacctgcctttctgccaggatcacatcactggaagctccatgactctctttttgtaaaagaaaaaaaaatcacagaaacacccacctcccaaactattctcttttacttcttcccccaagcccacccccaaatataactgttatccagaagctgttatgtcctgtttccatacatgtttttgtacttttactatatctacatacatcaattaaacttatgtcctattgttttgtgaatttatatttgcgtatacattatcatatgtaaaatttgcatttttttattgaaaattatgtttcttgagatttatccacattgaaacatggagctctaaatcgttaattttaaccgctatagagtattccataatttgaataaagcataatttgtttgtacaatctcccgccaagggaaaattatttccacactcatcatgacaaggagcactgcaaaaataaaaataaaaattacattcatacatgttt

SEQ ID NO: 204 - protein, 402 aa, Homo sapiens
MKETRGYGGDAPFCTRLNHSYTGMWAPERSAEARGNLTRPPGSGEDCGSVSVAFPITMLLTGFVGNALAMLLVSRSYRRRESKRKKSFLLCIGWLALTDLVGQLLTTPVVIVVYLSKQRWEHIDPSGRLCTFFGLTMTVFGLSSLFIASAMAVERALAIRAPHWYASHMKTRATRAVLLGVWLAVLAFALLPVLGVGQYTVQWPGTWCFISTGRGGNGTSSSHNWGNLFFASAFAFLGLLALTVTFSCNLATIKALVSRCRAKATASQSSAQWGRITTETAIQLMGIMCVLSVCWSPLLIMMLKMIFNQTSVEHCKTHTEKQKECNFFLIAVRLASLNQILDPWVYLLLRKILLRKFCQMRKRRLREQEMGPDGRCFCHAWRQVPRTWCSSHDREPCSVQLS

SEQ ID NO: 205 - DNA, 1986 bp, Homo sapiens
  CDS (232)..(1413)
accagaggtttcccagagaggaaggcgtggctccctcccgggccagtgagccctggcgccgccgcggccgcggtcccagcagcggagtagggcggcggctgcgccccgcaccatggggggcagcccagccccagccgcggtaaacgccgacctccgccgccgcccgcgccgcgtctgccccctcccgctgcggctctctggacgccatcccctcctcacctcgaagccaacatgaaggagacccggggctacggaggggatgcccccttctgcacccgcctcaaccactcctacacaggcatgtgggcgcccgagcgttccgccgaggcgcggggcaacctcacgcgccctccagggtctggcgaggattgcggatcggtgtccgtggccttcccgatcaccatgctgctcactggtttcgtgggcaacgcactggccatgctgctcgtgtcgcgcagctaccggcgccgggagagcaagcgcaagaagtccttcctgctgtgcatcggctggctggcgctcaccgacctggtcgggcagcttctcaccaccccggtcgtcatcgtcgtgtacctgtccaagcagcgttgggagcacatcgacccgtcggggcggctctgcacctttttcgggctgaccatgactgttttcgggctctcctcgttgttcatcgccagcgccatggccgtcgagcgggcgctggccatcagggcgccgcactggtatgcgagccacatgaagacgcgtgccacccgcgctgtgctgctcggcgtgtggctggccgtgctcgccttcgccctgctgccggtgctgggcgtgggccagtacaccgtccagtggcccgggacgtggtgcttcatcagcaccgggcgagggggcaacgggactagctcttcgcataactggggcaaccttttcttcgcctctgcctttgccttcctggggctcttggcgctgacagtcaccttttcctgcaacctggccaccattaaggccctggtgtcccgctgccgggccaaggccacggcatctcagtccagtgcccagtggggccgcatcacgaccgagacggccattcagcttatggggatcatgtgcgtgctgtcggtctgctggtctccgctcctgataatgatgttgaaaatgatcttcaatcagacatcagttgagcactgcaagacacacacggagaagcagaaagaatgcaacttcttcttaatagctgttcgcctggcttcactgaaccagatcttggatccttgggtttacctgctgttaagaaagatccttcttcgaaagttttgccaggagatggggcctgatggaaggtgtttttgtcatgcatggaggcaggtccccaggacttggtgcagttctcatgatagagaaccctgcagtgtccagctaagctgatgacttgaagataaatctgcctaaccctgggatgaagtatctgtgaactattttgacagcagatgaggaattttggggaaattaaaacctgcctttctgccaggatcacatcactggaagctccatgactctctttttgtaaaagaaaaaaaaatcacagaaacacccacctcccaaactattctcttttacttcttcccccaagcccacccccaaatataactgttatccagaagctgttatgtcctgtttccatacatgtttttgtacttttactatatctacatacatcaattaaacttatgtcctattgttttgtgaatttatatttgcgtatacattatcatatgtaaaatttgcatttttttattgaaaattatgtttcttgagatttatccacattgaaacatggagctctaaatcgttaattttaaccgctatagagtattccataatttgaataaagcataatttgtttgtacaatctcccgccaagggaaaattatttccacactcatcatgacaaggagcactgcaaaaataaaaataaaaattacattcatacatgtttaa

SEQ ID NO: 206 - protein, 393 aa, Homo sapiens
MKETRGYGGDAPFCTRLNHSYTGMWAPERSAEARGNLTRPPGSGEDCGSVSVAFPITMLLTGFVGNALAMLLVSRSYRRRESKRKKSFLLCIGWLALTDLVGQLLTTPVVIVVYLSKQRWEHIDPSGRLCTFFGLTMTVFGLSSLFIASAMAVERALAIRAPHWYASHMKTRATRAVLLGVWLAVLAFALLPVLGVGQYTVQWPGTWCFISTGRGGNGTSSSHNWGNLFFASAFAFLGLLALTVTFSCNLATIKALVSRCRAKATASQSSAQWGRITTETAIQLMGIMCVLSVCWSPLLIMMLKMIFNQTSVEHCKTHTEKQKECNFFLIAVRLASLNQILDPWVYLLLRKILLRKFCQEMGPDGRCFCHAWRQVPRTWCSSHDREPCSVQLS

SEQ ID NO: 207 - DNA, 1936 bp, Homo sapiens
  CDS (232)..(1404)
accagaggtttcccagagaggaaggcgtggctccctcccgggccagtgagccctggcgccgccgcggccgcggtcccagcagcggagtagggcggcggctgcgccccgcaccatggggggcagcccagccccagccgcggtaaacgccgacctccgccgccgcccgcgccgcgtctgccccctcccgctgcggctctctggacgccatcccctcctcacctcgaagccaacatgaaggagacccggggctacggaggggatgcccccttctgcacccgcctcaaccactcctacacaggcatgtgggcgcccgagcgttccgccgaggcgcggggcaacctcacgcgccctccagggtctggcgaggattgcggatcggtgtccgtggccttcccgatcaccatgctgctcactggtttcgtgggcaacgcactggccatgctgctcgtgtcgcgcagctaccggcgccgggagagcaagcgcaagaagtccttcctgctgtgcatcggctggctggcgctcaccgacctggtcgggcagcttctcaccaccccggtcgtcatcgtcgtgtacctgtccaagcagcgttgggagcacatcgacccgtcggggcggctctgcacctttttcgggctgaccatgactgttttcgggctctcctcgttgttcatcgccagcgccatggccgtcgagcgggcgctggccatcagggcgccgcactggtatgcgagccacatgaagacgcgtgccacccgcgctgtgctgctcggcgtgtggctggccgtgctcgccttcgccctgctgccggtgctgggcgtgggccagtacaccgtccagtggcccgggacgtggtgcttcatcagcaccgggcgagggggcaacgggactagctcttcgcataactggggcaaccttttcttcgcctctgcctttgccttcctggggctcttggcgctgacagtcaccttttcctgcaacctggccaccattaaggccctggtgtcccgctgccgggccaaggccacggcatctcagtccagtgcccagtggggccgcatcacgaccgagacggccattcagcttatggggatcatgtgcgtgctgtcggtctgctggtctccgctcctgataatgatgttgaaaatgatcttcaatcagacatcagttgagcactgcaagacacacacggagaagcagaaagaatgcaacttcttcttaatagctgttcgcctggcttcactgaaccagatcttggatccttgggtttacctgctgttaagaaagatccttcttcgaaagttttgccagatcaggtaccacacaaacaactatgcatccagctccacctccttaccctgccagtgttcctcaaccttgatgtggagcgaccatttggaaagatgagaaaaagaagactcagagagcaagaggaattttggggaaattaaaacctgcctttctgccaggatcacatcactggaagctccatgactctctttttgtaaaagaaaaaaaaatcacagaaacacccacctcccaaactattctcttttacttcttcccccaagcccacccccaaatataactgttatccagaagctgttatgtcctgtttccatacatgtttttgtacttttactatatctacatacatcaattaaacttatgtcctattgttttgtgaatttatatttgcgtatacattatcatatgtaaaatttgcatttttttattgaaaattatgtttcttgagatttatccacattgaaacatggagctctaaatcgttaattttaaccgctatagagtattccataatttgaataaagcataatttgtttgtacaatctcccgccaagggaaaattatttccacactcatcatgacaaggagcactgcaaaaataaaaataaaaattacattcatacatgtttaa

SEQ ID NO: 208 - protein, 390 aa, Homo sapiens
MKETRGYGGDAPFCTRLNHSYTGMWAPERSAEARGNLTRPPGSGEDCGSVSVAFPITMLLTGFVGNALAMLLVSRSYRRRESKRKKSFLLCIGWLALTDLVGQLLTTPVVIVVYLSKQRWEHIDPSGRLCTFFGLTMTVFGLSSLFIASAMAVERALAIRAPHWYASHMKTRATRAVLLGVWLAVLAFALLPVLGVGQYTVQWPGTWCFISTGRGGNGTSSSHNWGNLFFASAFAFLGLLALTVTFSCNLATIKALVSRCRAKATASQSSAQWGRITTETAIQLMGIMCVLSVCWSPLLIMMLKMIFNQTSVEHCKTHTEKQKECNFFLIAVRLASLNQILDPWVYLLLRKILLRKFCQIRYHTNNYASSSTSLPCQCSSTLMWSDHLER

SEQ ID NO: 209 - DNA, 7759 bp, Homo sapiens
  CDS (232)..(1398)
accagaggtttcccagagaggaaggcgtggctccctcccgggccagtgagccctggcgccgccgcggccgcggtcccagcagcggagtagggcggcggctgcgccccgcaccatggggggcagcccagccccagccgcggtaaacgccgacctccgccgccgcccgcgccgcgtctgccccctcccgctgcggctctctggacgccatcccctcctcacctcgaagccaacatgaaggagacccggggctacggaggggatgcccccttctgcacccgcctcaaccactcctacacaggcatgtgggcgcccgagcgttccgccgaggcgcggggcaacctcacgcgccctccagggtctggcgaggattgcggatcggtgtccgtggccttcccgatcaccatgctgctcactggtttcgtgggcaacgcactggccatgctgctcgtgtcgcgcagctaccggcgccgggagagcaagcgcaagaagtccttcctgctgtgcatcggctggctggcgctcaccgacctggtcgggcagcttctcaccaccccggtcgtcatcgtcgtgtacctgtccaagcagcgttgggagcacatcgacccgtcggggcggctctgcacctttttcgggctgaccatgactgttttcgggctctcctcgttgttcatcgccagcgccatggccgtcgagcgggcgctggccatcagggcgccgcactggtatgcgagccacatgaagacgcgtgccacccgcgctgtgctgctcggcgtgtggctggccgtgctcgccttcgccctgctgccggtgctgggcgtgggccagtacaccgtccagtggcccgggacgtggtgcttcatcagcaccgggcgagggggcaacgggactagctcttcgcataactggggcaaccttttcttcgcctctgcctttgccttcctggggctcttggcgctgacagtcaccttttcctgcaacctggccaccattaaggccctggtgtcccgctgccgggccaaggccacggcatctcagtccagtgcccagtggggccgcatcacgaccgagacggccattcagcttatggggatcatgtgcgtgctgtcggtctgctggtctccgctcctgataatgatgttgaaaatgatcttcaatcagacatcagttgagcactgcaagacacacacggagaagcagaaagaatgcaacttcttcttaatagctgttcgcctggcttcactgaaccagatcttggatccttgggtttacctgctgttaagaaagatccttcttcgaaagttttgccaggtagcaaatgctgtctccagctgctctaatgatggacagaaagggcagcctatctcattatctaatgaaataatacagacagaagcatgaaagaaaacacttaacttgcatgtgcacagcttttggtaacaaatatcgctaaaccttactgtgaatttaggcatctctggcatgccactgtttatgcattgaagtggaatttttggtataaagctaaatggtcttagaagcatagaaaatccctatgtgccaaaagtagtgaaacacaaacaaaggaaaatatattaataacagtctagtgtttttgttgagtctgccattcgtagctgaatatgtgattaattatgtgatgaaaacattttttataaatgatcttggtctattggggagcggggatagttaatattccagtacactgaatacatgaggaatttaaccacatacatcattgaagacaagggatagcagtttgtttttattcaaagacattgctgtgttctctttcattgcctctctcgctttctgtcacttttttcctccttacattaaagaaaagtttaattacagttaaaaatgtataatgtatttataatattcatcgataccattattcaaatattgctcaatacagcaaattagctcctaacctaacaaagtttaagtttacttggattgataattaggtttactctttatctgaataagaaccaattccatttgtttgaaatatggagtttgtgactacccaaattgctaattattctttcttttgaatatattttacatttctatgagcctaaggaagattcatgaaactgacctatgagagtcgtgaagtggtttttcagaatgctatgtaaggaccgatttgagcactaactataggtactctgaatatatatttcccttgattattcaccaaaagtgttccccagtctttgactctttaaattccaatactgattccaaaacaaataaatattttgaagactcaatgaatactttccatattttggcctatttatataagaaagttaataacattgacccttcacagctcttctgcctgctcctcaaagtggctctatctaaatatttattactaaaatgtttttcctacagtctacatgaatacaaacctcaatagctaagcttgacgtatttgtgcacaagtagatcactacattaagttttgggaattgcacttcttaaaaatgtctccccaccaaacatagtaatcctgtagttatgcctacacaaagcttgccatattctttggtgcattcattttgtaaacccattaactttttattgtgaagattttcatttgcagtttcttgcactgcttttctagttttttaaaagcttgagatttatttatacttcttgtagtaactgcatatttctgtgtgtgtttagtggtaaagaattaattttgataggtacaatatgtctatcagattgatatatacaccagcctatgtcaattggggctaattattttaaatgaccatgtcaaattgaatttggagacaaaatctgttgagagtgcttatgtaattaatgatggttctactaatctaaattttggaaaaggtgataaatagactatactaaaatctctctatgccatagaattggattatcctgtaggtcatctcattgggtataagacaaaactacctactttttttcaaaagtgcactgaaatcacataataaagaggctttacctcttggttggtcctgtgaccctaagttctagtcagatagacacagaggcaatgtgaatttgagtggcatgagcatgattaggttattccttccagcatctagtatagcacctggaatatagaaactgtctaatacatatttattcagtgaatcaatgagcagaagtttgccaggacagtacacattggcaaggcacataccatatgattgaagtgcttcatgccattacagtccatcaggctgataaagtgaattatttctgattatttaattacagaaatatgaatttatcttcaagggtgtagtgtcatactgctgtacaacacagtgctttatttatactaataatttaggagactgatacttccaaatgatagtggacattactatcacaagaatatcacttttcatcaaactgcaaaaatacagaaaggcaaaaaacctgacacttattcttaactgcaaattaaattcctgcccaggggatatattttaggaggggatgaatggcagcttttgtgttttttttaacaagcttgaaagggaggtggaaaacaaagaaattatgtaaatggcatatgagttttattatctaggcattcgttagtatggggaaacctgataagaaatgaaaatcccaaatgatttcagccttttcatgatggttgaggttagatttcagagatgtacagagactagagcggtggttagaaagaggatatatgtagtcacagcagaaagacgtgtctaagtttaattttattggctttcaagttcactcatgtatacttagtttgtccatacatatgtctaatcaggaaaaatgcatgtatagattatgacaattcctgaattttgaagtattggttaaaagacaattaaaggccaagaaaaccatggtggaagaagtaagcgaatgaaatgtagaaatatatgtaaaattagcaagtgtcaattttaccaagtagtgttgattttccaaacaatgaatttatatactatgctgagtcacagagaagaatgatcacatgttacttaatgagagcagtttacttttcaaataaaataggtatgatgaatgtcttaaaaatatcttgaagttgaagaaacaaaaatgagttatctcaatatttaccaagttaacctagtgctgtatatatcccaagatattttaggtaaatgtaagtgtttaatcatgccagatttaaactagtctgaaatatagggtatacatatatttctacttacatttctttattttatgaaatatccgaccatgttgcagaaaataatgcaaaacctcatgtaagttaactatgaaagatcctgtgagcacattggcattgagtgacagacaaactaaaaactggcaaacagtattttaataagggggtcactctgtggcagtattctaatattggattttcaagtagattaggctttttatttattcaacgctttttataattttgttctttttgactccaaattattggtcagctttcaaccttctccacatcagcaatcactaatagttcttttggttgagatcaactcagaaaaagaaaatagaaaacttttgttctttgaaattttagacatgcataatatctatttattttcataatttaaccccaaaagcttctcctgcaatacacaggattctaggagctgaatgacacagggagactacagagtatttattattacaaacacataaaaagcctaacttgaagaattaaaatttctattttttatctgtataacaagtacaaaccatcaacaatgacaaattttcacagctgcttgtttattgcttgttttatatgtttacatatctcaaaatctgttaaaactgaggtctaaaaaatgtgcagaattgtgcaactgtggcctagtccataagacttttctgagttgcaacaaagtgctgacaaagtgacagatgtctgtgatgtttcatgacataggttatgatcgagccaatttacaaaatttaataaccaacctaaactcacatacatatttgttaagaagctgacatcagttcagtattgtaaggaaactaactaggtggtgatgatgataaaagaattagggaaaatattttatttgatatattcccttttataattcctaaaatgaagattctatttaagggttataatttatataagtttagtcatataccattacattatgataccataagcagagtgcattatgattctctagaaatataattcaatcagatatgtattatatttatttatgtcacacattttctttactgagaataaaaattatcttattttcagaagctttgtatcaatcagtttcatgtaataagcaacccagatatctactagattatgtatttcttcatttgaaactacactgttttctcctagtccccttgactctactgtgcttatccattctttcacagaaagaaagtaacagacataattcctgttgatgaggctgggattgtttttaagaggagagataataacttcatatttttaaagtgccagtagcctaatatgtgaaacagatcagaatctgttgtgtagtaagtctgctttgttgaagaatttattatgggagtaaagataagaaggaaagagatcaccatcagaaacaagtcagccttttcatgcttttttgagcatttttggagatgattccacttctcaagttattatcatttgtgcatctcttcaatgctattgttaaatgctttagaattagaatattttgatcctttaattaaagtaagccaaacgtctaggcaaaaacagccaatcattaaactttaatagtaattcaaatatagatttctcatacagttttccatgtctgtagaaatcaaagttgtaatgttaagcagagggaaatgcgtgtgatttactaatacacttcaacgttctacttttgaaaggatactcatgtgggtggggcagagaacatagaaaaagatatgatggaaaacctgtccattttctacctgttaaccttcatcattttgtgccaggccctggaagcaaagagaggaagggaccgactgcatttatctttgaacacttgagcatcagtagtactactgagtggccaggggtcttgtctgtcaaagcaaatgataagttcactcaggccattattgactgctgaactctcttccttcccaactcttccttgaaagagaaaaaaatactttgccttcttgctctccttatcaaatgtttttgtacaaatagtgtaagcctgtttaagcaaaccaattaaaataggcactgattattttgatctgtttgtaacaaatgaatgtaagtactatttacatggtgtgcctaggaggagctgaaatcattggcactttaatccatattgtaaagatcagtatcaaaagcatagtgttcttcacctctcctcctcagcatccatctctatatacttgattaaatggaaaagtctcttttatcacctctatgtaaagttttatgggtagttatcgtcagtgtatttaaatatatcttctagtatgttttaaaggctggtcttcaatactgtggagacaaaaaataaaagagcgtatgaaaagtacgttagacttttgctggcattcaagtcatggctagtctgtgtatttaataaatgtgtgttatttatgtcgtgtttgtcaatggaaaataaagttgaatattctgaaatgtcgctgtgttttcttcctgatgtcaactcacgtcaggaatactttacctataactatgttaagtattttgctgaaatcccatttgatgtgctttgtcaaataatagcacaatgtaatgcaacagccccatgctatctggaaaaattagatcattttgttttatattccataatcatgtgcataacaaattattgttgatttaatataaatatgagagttgctcttttccgattttcaacatgatgtttctttgttttattatctcaagattattgttcttaacacagagtgcatttataaattattgtaagcttagttatttccctttcttgtggattttggtgtaatttacaggcagccaaaataagaattgtccttgctcatagtacaaccctttaattgacttgtgcctgagttttggtgtgagctgagtattggtggttatgaatactgggatccccagctatttgttcatgtacttattgaggtcactattggtcttccttcttcaatgaagggagaagctctgtcaaatgtagactgcaaagtcaagctcattaaaagtatccctctttcttcgtgagaaaagatatccaaggagaattctgtccctggttcctcccatgtgggggttctaggcctaggaccagatcttattgtctctacaatcttgattctttagtatttcaggataggcagagttttgttaaagtatacaaaaatcatagctagataagagagataacagaaataagttccagtgttctatactcctgtaggatgactacagttaatgctaatatacagttacaaatagctagaaggaggctattgaatgttcccaacacaaagaaatgataaatgtttgagatgatgatgtgctaattaccctcatctgaccagtatacattatatgtatcgaaacatcgctctgtgccctgcgaatatgtacaattgtgattattaaaataaatacataaataaaatttaaaagtcattatga

SEQ ID NO: 210 - protein, 388 aa, Homo sapiens
MKETRGYGGDAPFCTRLNHSYTGMWAPERSAEARGNLTRPPGSGEDCGSVSVAFPITMLLTGFVGNALAMLLVSRSYRRRESKRKKSFLLCIGWLALTDLVGQLLTTPVVIVVYLSKQRWEHIDPSGRLCTFFGLTMTVFGLSSLFIASAMAVERALAIRAPHWYASHMKTRATRAVLLGVWLAVLAFALLPVLGVGQYTVQWPGTWCFISTGRGGNGTSSSHNWGNLFFASAFAFLGLLALTVTFSCNLATIKALVSRCRAKATASQSSAQWGRITTETAIQLMGIMCVLSVCWSPLLIMMLKMIFNQTSVEHCKTHTEKQKECNFFLIAVRLASLNQILDPWVYLLLRKILLRKFCQVANAVSSCSNDGQKGQPISLSNEIIQTEA

SEQ ID NO: 211 - DNA, 1844 bp, Homo sapiens
  CDS (232)..(1356)
accagaggtttcccagagaggaaggcgtggctccctcccgggccagtgagccctggcgccgccgcggccgcggtcccagcagcggagtagggcggcggctgcgccccgcaccatggggggcagcccagccccagccgcggtaaacgccgacctccgccgccgcccgcgccgcgtctgccccctcccgctgcggctctctggacgccatcccctcctcacctcgaagccaacatgaaggagacccggggctacggaggggatgcccccttctgcacccgcctcaaccactcctacacaggcatgtgggcgcccgagcgttccgccgaggcgcggggcaacctcacgcgccctccagggtctggcgaggattgcggatcggtgtccgtggccttcccgatcaccatgctgctcactggtttcgtgggcaacgcactggccatgctgctcgtgtcgcgcagctaccggcgccgggagagcaagcgcaagaagtccttcctgctgtgcatcggctggctggcgctcaccgacctggtcgggcagcttctcaccaccccggtcgtcatcgtcgtgtacctgtccaagcagcgttgggagcacatcgacccgtcggggcggctctgcacctttttcgggctgaccatgactgttttcgggctctcctcgttgttcatcgccagcgccatggccgtcgagcgggcgctggccatcagggcgccgcactggtatgcgagccacatgaagacgcgtgccacccgcgctgtgctgctcggcgtgtggctggccgtgctcgccttcgccctgctgccggtgctgggcgtgggccagtacaccgtccagtggcccgggacgtggtgcttcatcagcaccgggcgagggggcaacgggactagctcttcgcataactggggcaaccttttcttcgcctctgcctttgccttcctggggctcttggcgctgacagtcaccttttcctgcaacctggccaccattaaggccctggtgtcccgctgccgggccaaggccacggcatctcagtccagtgcccagtggggccgcatcacgaccgagacggccattcagcttatggggatcatgtgcgtgctgtcggtctgctggtctccgctcctgataatgatgttgaaaatgatcttcaatcagacatcagttgagcactgcaagacacacacggagaagcagaaagaatgcaacttcttcttaatagctgttcgcctggcttcactgaaccagatcttggatccttgggtttacctgctgttaagaaagatccttcttcgaaagttttgccagatgagaaaaagaagactcagagagcaagaggaattttggggaaattaaaacctgcctttctgccaggatcacatcactggaagctccatgactctctttttgtaaaagaaaaaaaaatcacagaaacacccacctcccaaactattctcttttacttcttcccccaagcccacccccaaatataactgttatccagaagctgttatgtcctgtttccatacatgtttttgtacttttactatatctacatacatcaattaaacttatgtcctattgttttgtgaatttatatttgcgtatacattatcatatgtaaaatttgcatttttttattgaaaattatgtttcttgagatttatccacattgaaacatggagctctaaatcgttaattttaaccgctatagagtattccataatttgaataaagcataatttgtttgtacaatctcccgccaagggaaaattatttccacactcatcatgacaaggagcactgcaaaaataaaaataaaaattacattcatacatgtttaa

SEQ ID NO: 212 - protein, 374 aa, Homo sapiens
MKETRGYGGDAPFCTRLNHSYTGMWAPERSAEARGNLTRPPGSGEDCGSVSVAFPITMLLTGFVGNALAMLLVSRSYRRRESKRKKSFLLCIGWLALTDLVGQLLTTPVVIVVYLSKQRWEHIDPSGRLCTFFGLTMTVFGLSSLFIASAMAVERALAIRAPHWYASHMKTRATRAVLLGVWLAVLAFALLPVLGVGQYTVQWPGTWCFISTGRGGNGTSSSHNWGNLFFASAFAFLGLLALTVTFSCNLATIKALVSRCRAKATASQSSAQWGRITTETAIQLMGIMCVLSVCWSPLLIMMLKMIFNQTSVEHCKTHTEKQKECNFFLIAVRLASLNQILDPWVYLLLRKILLRKFCQMRKRRLREQEEFWGN

SEQ ID NO: 213 - DNA, 1817 bp, Homo sapiens
  CDS (232)..(1329)
accagaggtttcccagagaggaaggcgtggctccctcccgggccagtgagccctggcgccgccgcggccgcggtcccagcagcggagtagggcggcggctgcgccccgcaccatggggggcagcccagccccagccgcggtaaacgccgacctccgccgccgcccgcgccgcgtctgccccctcccgctgcggctctctggacgccatcccctcctcacctcgaagccaacatgaaggagacccggggctacggaggggatgcccccttctgcacccgcctcaaccactcctacacaggcatgtgggcgcccgagcgttccgccgaggcgcggggcaacctcacgcgccctccagggtctggcgaggattgcggatcggtgtccgtggccttcccgatcaccatgctgctcactggtttcgtgggcaacgcactggccatgctgctcgtgtcgcgcagctaccggcgccgggagagcaagcgcaagaagtccttcctgctgtgcatcggctggctggcgctcaccgacctggtcgggcagcttctcaccaccccggtcgtcatcgtcgtgtacctgtccaagcagcgttgggagcacatcgacccgtcggggcggctctgcacctttttcgggctgaccatgactgttttcgggctctcctcgttgttcatcgccagcgccatggccgtcgagcgggcgctggccatcagggcgccgcactggtatgcgagccacatgaagacgcgtgccacccgcgctgtgctgctcggcgtgtggctggccgtgctcgccttcgccctgctgccggtgctgggcgtgggccagtacaccgtccagtggcccgggacgtggtgcttcatcagcaccgggcgagggggcaacgggactagctcttcgcataactggggcaaccttttcttcgcctctgcctttgccttcctggggctcttggcgctgacagtcaccttttcctgcaacctggccaccattaaggccctggtgtcccgctgccgggccaaggccacggcatctcagtccagtgcccagtggggccgcatcacgaccgagacggccattcagcttatggggatcatgtgcgtgctgtcggtctgctggtctccgctcctgataatgatgttgaaaatgatcttcaatcagacatcagttgagcactgcaagacacacacggagaagcagaaagaatgcaacttcttcttaatagctgttcgcctggcttcactgaaccagatcttggatccttgggtttacctgctgttaagaaagatccttcttcgaaagttttgccaggaggaattttggggaaattaaaacctgcctttctgccaggatcacatcactggaagctccatgactctctttttgtaaaagaaaaaaaaatcacagaaacacccacctcccaaactattctcttttacttcttcccccaagcccacccccaaatataactgttatccagaagctgttatgtcctgtttccatacatgtttttgtacttttactatatctacatacatcaattaaacttatgtcctattgttttgtgaatttatatttgcgtatacattatcatatgtaaaatttgcatttttttattgaaaattatgtttcttgagatttatccacattgaaacatggagctctaaatcgttaattttaaccgctatagagtattccataatttgaataaagcataatttgtttgtacaatctcccgccaagggaaaattatttccacactcatcatgacaaggagcactgcaaaaataaaaataaaaattacattcatacatgtttaa

SEQ ID NO: 214 - protein, 365 aa, Homo sapiens
MKETRGYGGDAPFCTRLNHSYTGMWAPERSAEARGNLTRPPGSGEDCGSVSVAFPITMLLTGFVGNALAMLLVSRSYRRRESKRKKSFLLCIGWLALTDLVGQLLTTPVVIVVYLSKQRWEHIDPSGRLCTFFGLTMTVFGLSSLFIASAMAVERALAIRAPHWYASHMKTRATRAVLLGVWLAVLAFALLPVLGVGQYTVQWPGTWCFISTGRGGNGTSSSHNWGNLFFASAFAFLGLLALTVTFSCNLATIKALVSRCRAKATASQSSAQWGRITTETAIQLMGIMCVLSVCWSPLLIMMLKMIFNQTSVEHCKTHTEKQKECNFFLIAVRLASLNQILDPWVYLLLRKILLRKFCQEEFWGN

SEQ ID NO: 215 - DNA, 1963 bp, Homo sapiens
  CDS (232)..(1488)
accagaggtttcccagagaggaaggcgtggctccctcccgggccagtgagccctggcgccgccgcggccgcggtcccagcagcggagtagggcggcggctgcgccccgcaccatggggggcagcccagccccagccgcggtaaacgccgacctccgccgccgcccgcgccgcgtctgccccctcccgctgcggctctctggacgccatcccctcctcacctcgaagccaacatgaaggagacccggggctacggaggggatgcccccttctgcacccgcctcaaccactcctacacaggcatgtgggcgcccgagcgttccgccgaggcgcggggcaacctcacgcgccctccagggtctggcgaggattgcggatcggtgtccgtggccttcccgatcaccatgctgctcactggtttcgtgggcaacgcactggccatgctgctcgtgtcgcgcagctaccggcgccgggagagcaagcgcaagaagtccttcctgctgtgcatcggctggctggcgctcaccgacctggtcgggcagcttctcaccaccccggtcgtcatcgtcgtgtacctgtccaagcagcgttgggagcacatcgacccgtcggggcggctctgcacctttttcgggctgaccatgactgttttcgggctctcctcgttgttcatcgccagcgccatggccgtcgagcgggcgctggccatcagggcgccgcactggtatgcgagccacatgaagacgcgtgccacccgcgctgtgctgctcggcgtgtggctggccgtgctcgccttcgccctgctgccggtgctgggcgtgggccagtacaccgtccagtggcccgggacgtggtgcttcatcagcaccgggcgagggggcaacgggactagctcttcgcataactggggcaaccttttcttcgcctctgcctttgccttcctggggctcttggcgctgacagtcaccttttcctgcaacctggccaccattaaggccctggtgtcccgctgccgggccaaggccacggcatctcagtccagtgcccagtggggccgcatcacgaccgagacggccattcagcttatggggatcatgtgcgtgctgtcggtctgctggtctccgctcctgataatgatgttgaaaatgatcttcaatcagacatcagttgagcactgcaagacacacacggagaagcagaaagaatgcaacttcttcttaatagctgttcgcctggcttcactgaaccagatcttggatccttgggtttacctgctgttaagaaagatccttcttcgaaagttttgccagatgagaaaaagaagactcagagagcaattaatctgcagtttgcagaactctcagatacagagggcaactgcacattgtgggcaagtacaaacctatcgtgtgctgaacagagaagaaatggaggtactcgtgagcagcattaatgtgtacaccagaatctcaacagtaaagacagaataacatgaagaaaataactacaggagtgctgtgttttaaaaaagcaagctcctccagctgagtttgtgactctaatccctgcttattttgagcactttccatgtgttgattgactcggaaaggtgggagattaccagcaagccaggtcatttgggcaaacatgggcatatttttagcaaagctgaacaaactggttggtcactcgaactacccaatttagacttatagtaagaatagcacatggttcagaattgccaagactgctgctttagtcaacagaaattttttcatatgcatgctggtaatgcagtgcatctctggaagaaatgcaagagtattttaacatttggtccagaagaaatatgtaaagggtgtttgtagaatttgatgccctcttcagtgacataaggttatgggtttgtgaatggaaaatctgttatttgttcaggttattaaaacacattctaattcaacatca

SEQ ID NO: 216 - protein, 418 aa, Homo sapiens
MKETRGYGGDAPFCTRLNHSYTGMWAPERSAEARGNLTRPPGSGEDCGSVSVAFPITMLLTGFVGNALAMLLVSRSYRRRESKRKKSFLLCIGWLALTDLVGQLLTTPVVIVVYLSKQRWEHIDPSGRLCTFFGLTMTVFGLSSLFIASAMAVERALAIRAPHWYASHMKTRATRAVLLGVWLAVLAFALLPVLGVGQYTVQWPGTWCFISTGRGGNGTSSSHNWGNLFFASAFAFLGLLALTVTFSCNLATIKALVSRCRAKATASQSSAQWGRITTETAIQLMGIMCVLSVCWSPLLIMMLKMIFNQTSVEHCKTHTEKQKECNFFLIAVRLASLNQILDPWVYLLLRKILLRKFCQMRKRRLREQLICSLQNSQIQRATAHCGQVQTYRVLNREEMEVLVSSINVYTRISTVKTE

SEQ ID NO: 217 - DNA, 2353 bp, Homo sapiens
  CDS (232)..(1404)
accagaggtttcccagagaggaaggcgtggctccctcccgggccagtgagccctggcgccgccgcggccgcggtcccagcagcggagtagggcggcggctgcgccccgcaccatggggggcagcccagccccagccgcggtaaacgccgacctccgccgccgcccgcgccgcgtctgccccctcccgctgcggctctctggacgccatcccctcctcacctcgaagccaacatgaaggagacccggggctacggaggggatgcccccttctgcacccgcctcaaccactcctacacaggcatgtgggcgcccgagcgttccgccgaggcgcggggcaacctcacgcgccctccagggtctggcgaggattgcggatcggtgtccgtggccttcccgatcaccatgctgctcactggtttcgtgggcaacgcactggccatgctgctcgtgtcgcgcagctaccggcgccgggagagcaagcgcaagaagtccttcctgctgtgcatcggctggctggcgctcaccgacctggtcgggcagcttctcaccaccccggtcgtcatcgtcgtgtacctgtccaagcagcgttgggagcacatcgacccgtcggggcggctctgcacctttttcgggctgaccatgactgttttcgggctctcctcgttgttcatcgccagcgccatggccgtcgagcgggcgctggccatcagggcgccgcactggtatgcgagccacatgaagacgcgtgccacccgcgctgtgctgctcggcgtgtggctggccgtgctcgccttcgccctgctgccggtgctgggcgtgggccagtacaccgtccagtggcccgggacgtggtgcttcatcagcaccgggcgagggggcaacgggactagctcttcgcataactggggcaaccttttcttcgcctctgcctttgccttcctggggctcttggcgctgacagtcaccttttcctgcaacctggccaccattaaggccctggtgtcccgctgccgggccaaggccacggcatctcagtccagtgcccagtggggccgcatcacgaccgagacggccattcagcttatggggatcatgtgcgtgctgtcggtctgctggtctccgctcctgataatgatgttgaaaatgatcttcaatcagacatcagttgagcactgcaagacacacacggagaagcagaaagaatgcaacttcttcttaatagctgttcgcctggcttcactgaaccagatcttggatccttgggtttacctgctgttaagaaagatccttcttcgaaagttttgccagatcaggtaccacacaaacaactatgcatccagctccacctccttaccctgccagtgttcctcaaccttgatgtggagcgaccatttggaaagataatgaaagaacggagttggacattttattgcaattcctgcttccctgaatttgcatatttcttcccacctgagaaggataattatatattttaatttggattatttcttcatttttatctttttattttaatgattgttttgtcagtaatacccatggagatcaactttattattataatccatgcctctgaatattagattggtttcttggatgggattttgaatatgcatttaagaagttgggaagaatttcacagatgatgattggaggaaaagtgatgaaaagaaagacctgtgttccaggagttttctccaacttcaaacctttacgtgaatcttaaccaaagtggacatctttacatttcatgatagcttgcttttgcaatatgagtttgaaaaatcagtataagcttatgatggtgaaaagtcaacatattgagagtgataattcaattaataggatatgaacttaacgacatataaaagcaaatgagggcaggagggaatcgtgacaaaaaatatttgtgcccaattatgattaatgttttagagatgttgtgtccctgtgggcttagcatggaactaaaagttcctaagtctcaattctagttatgtgtcatttagtaactcaggaatctgcttaattgttatttctaagcttttgatgacaaaggagtgatgcagctaagggcatccttggagtgtcataaaaaacaaatttgaggttgaatgattagctgcgcagttagagtgataaaaaaatccaggtaggccttctgattcaccatgaccaagtcaggatttcttaatatttcttttctggcagcatatacaaaggcaaaattaataaataacagttgttgaataacaaactttattacgtttttataaaataaaagaatctattttgtctgtattaaaataaaaaactttgtggacttctaaaagat

SEQ ID NO: 218 - protein, 390 aa, Homo sapiens; identical to SEQ ID NO: 208

SEQ ID NO: 219 - DNA, 2055 bp, Homo sapiens
  CDS (232)..(1404)
accagaggtttcccagagaggaaggcgtggctccctcccgggccagtgagccctggcgccgccgcggccgcggtcccagcagcggagtagggcggcggctgcgccccgcaccatggggggcagcccagccccagccgcggtaaacgccgacctccgccgccgcccgcgccgcgtctgccccctcccgctgcggctctctggacgccatcccctcctcacctcgaagccaacatgaaggagacccggggctacggaggggatgcccccttctgcacccgcctcaaccactcctacacaggcatgtgggcgcccgagcgttccgccgaggcgcggggcaacctcacgcgccctccagggtctggcgaggattgcggatcggtgtccgtggccttcccgatcaccatgctgctcactggtttcgtgggcaacgcactggccatgctgctcgtgtcgcgcagctaccggcgccgggagagcaagcgcaagaagtccttcctgctgtgcatcggctggctggcgctcaccgacctggtcgggcagcttctcaccaccccggtcgtcatcgtcgtgtacctgtccaagcagcgttgggagcacatcgacccgtcggggcggctctgcacctttttcgggctgaccatgactgttttcgggctctcctcgttgttcatcgccagcgccatggccgtcgagcgggcgctggccatcagggcgccgcactggtatgcgagccacatgaagacgcgtgccacccgcgctgtgctgctcggcgtgtggctggccgtgctcgccttcgccctgctgccggtgctgggcgtgggccagtacaccgtccagtggcccgggacgtggtgcttcatcagcaccgggcgagggggcaacgggactagctcttcgcataactggggcaaccttttcttcgcctctgcctttgccttcctggggctcttggcgctgacagtcaccttttcctgcaacctggccaccattaaggccctggtgtcccgctgccgggccaaggccacggcatctcagtccagtgcccagtggggccgcatcacgaccgagacggccattcagcttatggggatcatgtgcgtgctgtcggtctgctggtctccgctcctgataatgatgttgaaaatgatcttcaatcagacatcagttgagcactgcaagacacacacggagaagcagaaagaatgcaacttcttcttaatagctgttcgcctggcttcactgaaccagatcttggatccttgggtttacctgctgttaagaaagatccttcttcgaaagttttgccagatcaggtaccacacaaacaactatgcatccagctccacctccttaccctgccagtgttcctcaaccttgatgtggagcgaccatttggaaagatgagaaaaagaagactcagagagcaattaatctgcagtttgcagaactctcagatacagagggcaactgcacattgtgggcaagtacaaacctatcgtgtgctgaacagagaagaaatggaggtactcgtgagcagcattaatgtgtacaccagaatctcaacagtaaagacagaataacatgaagaaaataactacaggagtgctgtgttttaaaaaagcaagctcctccagctgagtttgtgactctaatccctgcttattttgagcactttccatgtgttgattgactcggaaaggtgggagattaccagcaagccaggtcatttgggcaaacatgggcatatttttagcaaagctgaacaaactggttggtcactcgaactacccaatttagacttatagtaagaatagcacatggttcagaattgccaagactgctgctttagtcaacagaaattttttcatatgcatgctggtaatgcagtgcatctctggaagaaatgcaagagtattttaacatttggtccagaagaaatatgtaaagggtgtttgtagaatttgatgccctcttcagtgacataaggttatgggtttgtgaatggaaaatctgttatttgttcaggttattaaaacacattctaattcaacatca

SEQ ID NO: 220 - protein, 390 aa, Homo sapiens; identical to SEQ ID NO: 208

SEQ ID NO: 221 - DNA, 6173 bp, Homo sapiens
  CDS (368)..(4708)
gtctctccggcaggaggcggtggcggcgccgcgcccgagcccgcattcctcagaagcgcccggagcccgcggggcgacgtcacccccggctccgcccccgtccctccccgagcaaagtaactcttgactaacaggagcagcctccgccgagcatggagagctgccgccgcggccggccggcgacgctggcgacgctttcgcccctgaggtagtttggcgaccgcgaagaaggaaaaagggcgggcgggcggctgtcctctcaccgtcctcaccccgcgaggcccggcccgctcctccgtcgtggatttcgcggcgatccccccggcagctctttgcaaagctgcttgaaacttctcccaaactcggcatggatacgactgcggcggcggcgctgcctgcttttgtggcgctcttgctcctctctccttggcctctcctgggatcggcccaaggccagttctccgcaggtggctgtacttttgatgatggtccaggggcctgtgattaccaccaggatctgtatgatgactttgaatgggtgcatgttagtgctcaagagcctcattatctaccacccgagatgccccaaggttcctatatgatagtggactcttcagatcacgaccctggagaaaaagccagacttcagctgcctacaatgaaggagaacgacactcactgcattgatttcagttacctattatatagccagaaaggactgaatcctggcactttgaacatattagttagggtgaataaaggacctcttgccaatccaatttggaatgtgactggattcacgggtagagattggcttcgggctgagctagcagtgagcaccttttggcccaatgaatatcaggtaatatttgaagctgaagtctcaggagggagaagtggttatattgccattgatgacatccaagtactgagttatccttgtgataaatctcctcatttcctccgtctaggggatgtagaggtgaatgcagggcaaaacgctacatttcagtgcattgccacagggagagatgctgtgcataacaagttatggctccagagacgaaatggagaagatataccagtagcccagactaagaacatcaatcatagaaggtttgccgcttccttcagattgcaagaagtgacaaaaactgaccaggatttgtatcgctgtgtaactcagtcagaacgaggttccggtgtgtccaattttgctcaacttattgtgagagaaccgccaagacccattgctcctcctcagcttcttggtgttgggcctacatatttgctgatccaactaaatgccaactcgatcattggcgatggtcctatcatcctgaaagaagtagagtaccgaatgacatcaggatcctggacagaaacccatgcagtcaatgctccaacttacaaattatggcatttagatccagataccgaatatgagatccgagttctacttacaagacctggtgaaggtggaacggggctcccaggacctccactaatcaccagaacaaaatgtgcagaacctatgagaaccccaaagacattaaagattgctgaaatacaggcaagacggattgctgtggactgggaatccttgggttacaacattacgcgttgccacacttttaatgtcactatctgctaccattacttccgtggtcacaacgagagcaaggcagactgtttggacatggaccccaaagcccctcagcatgttgtgaaccatctgccaccttatacaaatgtcagcctcaagatgatcctaaccaatccagagggaaggaaggagagtgaagagacaattattcaaactgatgaagatgtgcctggtcccgtaccagtaaaatctcttcaaggaacatcctttgaaaataagatcttcttgaactggaaagaacctttggatccaaatggaatcatcactcaatatgagatcagctatagcagtataagatcatttgatcctgcagttccagtggctggacctccccagactgtatcaaatttatggaacagtacacaccatgtctttatgcatctccaccctggaaccacgtaccagtttttcataagagccagcacggtcaaaggctttggtccagccacagccatcaatgtcaccaccaatatctcagctccaactttacctgactatgaaggagttgatgcctctctcaatgaaactgccaccacaataactgtattgttgagaccagcacaagccaaaggtgctcctatcagtgcttatcagattgttgtggaagaactgcacccacaccgaaccaagagagaagccggagccatggaatgctaccaggttcctgtcacataccaaaatgccatgagtgggggtgcaccgtattactttgctgcagaactccccccgggaaacctacctgagcctgccccgttcactgtgggtgacaatcggacctaccaaggcttttggaaccctcctttggctccgcgcaaaggatacaacatctatttccaggcgatgagcagtgtggagaaggaaactaaaacccagtgcgtacgcattgctacaaaagcagcagcaacagaagaaccagaagtgatcccagatcccgccaagcagacagacagagtggtgaaaatagcaggaattagtgctggaattttggtgttcatcctccttctcctagttgtcatattaattgtaaaaaagagcaaacttgctaaaaaacgcaaagatgccatggggaatacccggcaggagatgactcacatggtgaatgcaatggatcgaagttatgctgatcagagcactctgcatgcagaagatcctctttccatcaccttcatggaccaacataactttagtccaagatatgagaaccacagtgctacagcagagtccagtcgccttctagacgtacctcgctacctctgtgaggggacggaatccccttaccagacaggacagctgcatccagccatcagggtagctgatttactgcagcacattaatctcatgaagacatcagacagctatgggttcaaagaggaatatgagagcttttttgaaggacagtcagcatcttgggatgtagctaaaaaagatcaaaatagagcaaaaaaccgatatggaaacattatagcatatgatcactccagagtgattttgcaacccgtagaggatgatccttcctcagattatattaatgccaactatattgatatttggctgtacagggatggctaccagagaccaagtcattacattgcaacccaaggtcccgttcatgaaacagtgtatgatttctggaggatgatttggcaagaacaatctgcttgcattgtgatggttacaaatttagttgaggttggccgggttaaatgctataaatattggcctgatgatactgaagtttatggtgacttcaaagtaacgtgtgtagaaatggaaccacttgctgaatatgtagttaggacattcaccctggaaaggagggggtacaatgaaatccgtgaagttaaacagttccatttcacgggctggcctgaccatggagtgccctaccatgctacagggctgctttcctttatccggcgagtcaagttatcaaaccctcccagtgctggccccatcgttgtacattgcagtgctggtgctggacgaactggctgctacattgtgattgacatcatgctagacatggctgaaagagagggtgttgttgatatttacaattgtgtcaaagccttaagatctcggcgtattaatatggtccagacagaggaacagtacatttttattcatgatgccattttagaagcctgcttatgtggagaaactgccatacctgtctgtgaatttaaagctgcatattttgatatgattagaatagactcccagactaactcttcacatctcaaggatgaatttcagactctgaattcagtcacccctcgactacaagctgaagactgcagtatagcgtgcctgccaaggaaccatgacaagaaccgtttcatggacatgctgccacctgacagatgtctgccttttttaattacaattgatggggagagcagtaactacatcaatgctgctcttatggacagctacaggcaaccagctgctttcatcgtcacacaataccctctgccaaacactgtaaaagacttctggagattagtgtatgattatggctgtacctccattgtgatgttaaacgaagtcgacttgtcccagggctgccctcagtactggccagaggaagggatgctacgatatggccccatccaagtggaatgtatgtcttgttcaatggactgtgatgtgatcaaccggatttttaggatatgcaatctaacaagaccacaggaaggttatctgatggtgcaacagtttcagtacctaggatgggcttctcatcgagaagtgcctggatccaaaaggtcattcttgaaactgatacttcaggtggaaaagtggcaggaggaatgcgaggaaggggaaggccggacgattatccactgcctaaatggtggcgggcgaagtggcatgttctgtgctataggcatcgttgttgaaatggtgaaacggcaaaatgttgtcgatgttttccatgcagtaaagacactgaggaacagcaagccaaacatggtggaagccccggagcaataccgtttctgctatgatgtagctttggagtacctggaatcatcttagttgggtgagactctttaaagtgcatccatgaagaaacctgtccatctattgagccagcagctgttgtacctgttacacttgtgcagaaagattttaatgtggggggtgggagacttttacatttgagaggtaaaagtattttttttatgaagttgtgtatcttaataaaaaggactgaattagtttttattactatattaaagcatcaacatttcatgccacataaattatatttaataagaaccagattgaaatgagaacgtattggtgtttgtacagtgaacatgccaccttttttctcatggtttcagtagagcagctaccacatgttgcatgagttcatactttctacgtggcatttttctccctttctaaaatgaaagctgatgaatcttaaaaggaagaagaaaagaaaagctgtgcaaattcatagtaaagttcgttttttatatgtttccagtgtagcagatctctatataaatatataaatatatataactggcttattttcttttaatgtgcaatgatggctggatcatttaaagttctttttagaaaataacataagccaaagactcaagtgtaaatatgtctatatggagaaagcacattatatttattggttacttacattccttttttgatggctaaaatactaccaccacacaatcatcttttttttcctgaagaaagctttttctttagctaaaatcaattgtaaacgatttttgtagattattttttgtatgttttagtgtaagtagaagataaactttttattcataaaccaggaagcaatgttctttatagtgattctcttgtgtacatgcttgtgaattaaatttgtgtaaaatcccttggcaattgggtcttttaatataggaccaaattaaaacattttgctgaatatgtatagtttttcacaatttcattaggtaaataatggtttggtgatcatacatgagaaatgtacacattaaaaggccttgctgacaacttgcacaatgttgaacatagcctttaagcatcatttaaattttaaaggaatggagtttttcagcctgtggcccagcactggtcaagaaaacaagatggcaacatatatgctttcagggtcaaatttgagcaaactgtaaactgtcagggtgataaaatgtttctcttgatgtttacatgcacaagctttgcgttctgactataaaaagtgtgaacaaatcaatgccagattcctgttttgcgcattgtcatgggattcttaagtgaacctttctaaatgtggtcttgttcacatgctccacgtagctgtaacttcacatcatcagcttgcagtttgtaattgactaaagcattccagtgtcctctttctagattgccagctcatgacatggtgcttataaagatttaattaaagtaagaatgaaataaagtttttataattataacagttaaaaaaaaaaaaaaaaaa

SEQ ID NO: 222 - protein, 1446 aa, Homo sapiens
MDTTAAAALPAFVALLLLSPWPLLGSAQGQFSAGGCTFDDGPGACDYHQDLYDDFEWVHVSAQEPHYLPPEMPQGSYMIVDSSDHDPGEKARLQLPTMKENDTHCIDFSYLLYSQKGLNPGTLNILVRVNKGPLANPIWNVTGFTGRDWLRAELAVSTFWPNEYQVIFEAEVSGGRSGYIAIDDIQVLSYPCDKSPHFLRLGDVEVNAGQNATFQCIATGRDAVHNKLWLQRRNGEDIPVAQTKNINHRRFAASFRLQEVTKTDQDLYRCVTQSERGSGVSNFAQLIVREPPRPIAPPQLLGVGPTYLLIQLNANSIIGDGPIILKEVEYRMTSGSWTETHAVNAPTYKLWHLDPDTEYEIRVLLTRPGEGGTGLPGPPLITRTKCAEPMRTPKTLKIAEIQARRIAVDWESLGYNITRCHTFNVTICYHYFRGHNESKADCLDMDPKAPQHVVNHLPPYTNVSLKMILTNPEGRKESEETIIQTDEDVPGPVPVKSLQGTSFENKIFLNWKEPLDPNGIITQYEISYSSIRSFDPAVPVAGPPQTVSNLWNSTHHVFMHLHPGTTYQFFIRASTVKGFGPATAINVTTNISAPTLPDYEGVDASLNETATTITVLLRPAQAKGAPISAYQIVVEELHPHRTKREAGAMECYQVPVTYQNAMSGGAPYYFAAELPPGNLPEPAPFTVGDNRTYQGFWNPPLAPRKGYNIYFQAMSSVEKETKTQCVRIATKAAATEEPEVIPDPAKQTDRVVKIAGISAGILVFILLLLVVILIVKKSKLAKKRKDAMGNTRQEMTHMVNAMDRSYADQSTLHAEDPLSITFMDQHNFSPRYENHSATAESSRLLDVPRYLCEGTESPYQTGQLHPAIRVADLLQHINLMKTSDSYGFKEEYESFFEGQSASWDVAKKDQNRAKNRYGNIIAYDHSRVILQPVEDDPSSDYINANYIDIWLYRDGYQRPSHYIATQGPVHETVYDFWRMIWQEQSACIVMVTNLVEVGRVKCYKYWPDDTEVYGDFKVTCVEMEPLAEYVVRTFTLERRGYNEIREVKQFHFTGWPDHGVPYHATGLLSFIRRVKLSNPPSAGPIVVHCSAGAGRTGCYIVIDIMLDMAEREGVVDIYNCVKALRSRRINMVQTEEQYIFIHDAILEACLCGETAIPVCEFKAAYFDMIRIDSQTNSSHLKDEFQTLNSVTPRLQAEDCSIACLPRNHDKNRFMDMLPPDRCLPFLITIDGESSNYINAALMDSYRQPAAFIVTQYPLPNTVKDFWRLVYDYGCTSIVMLNEVDLSQGCPQYWPEEGMLRYGPIQVECMSCSMDCDVINRIFRICNLTRPQEGYLMVQQFQYLGWASHREVPGSKRSFLKLILQVEKWQEECEEGEGRTIIHCLNGGGRSGMFCAIGIVVEMVKRQNVVDVFHAVKTLRNSKPNMVEAPEQYRFCYDVALEYLESS

SEQ ID NO: 223 - DNA, 6104 bp, Homo sapiens
  CDS (317)..(4639)
agaagcgcccggagcccgcggggcgacgtcacccccggctccgcccccgtccctccccgagcaaagtaactcttgactaacaggagcagcctccgccgagcatggagagctgccgccgcggccggccggcgacgctggcgacgctttcgcccctgaggtagtttggcgaccgcgaagaaggaaaaagggcgggcgggcggctgtcctctcaccgtcctcaccccgcgaggcccggcccgctcctccgtcgtggatttcgcggcgatccccccggcagctctttgcaaagctgcttgaaacttctcccaaactcggcatggatacgactgcggcggcggcgctgcctgcttttgtggcgctcttgctcctctctccttggcctctcctgggatcggcccaaggccagttctccgcaggtggctgtacttttgatgatggtccaggggcctgtgattaccaccaggatctgtatgatgactttgaatgggtgcatgttagtgctcaagagcctcattatctaccacccgagatgccccaaggttcctatatgatagtggactcttcagatcacgaccctggagaaaaagccagacttcagctgcctacaatgaaggagaacgacactcactgcattgatttcagttacctattatatagccagaaaggactgaatcctggcactttgaacatattagttagggtgaataaaggacctcttgccaatccaatttggaatgtgactggattcacgggtagagattggcttcgggctgagctagcagtgagcaccttttggcccaatgaatatcaggtaatatttgaagctgaagtctcaggagggagaagtggttatattgccattgatgacatccaagtactgagttatccttgtgataaatctcctcatttcctccgtctaggggatgtagaggtgaatgcagggcaaaacgctacatttcagtgcattgccacagggagagatgctgtgcataacaagttatggctccagagacgaaatggagaagatataccagtagcccagactaagaacatcaatcatagaaggtttgccgcttccttcagattgcaagaagtgacaaaaactgaccaggatttgtatcgctgtgtaactcagtcagaacgaggttccggtgtgtccaattttgctcaacttattgtgagagaaccgccaagacccattgctcctcctcagcttcttggtgttgggcctacatatttgctgatccaactaaatgccaactcgatcattggcgatggtcctatcatcctgaaagaagtagagtaccgaatgacatcaggatcctggacagaaacccatgcagtcaatgctccaacttacaaattatggcatttagatccagataccgaatatgagatccgagttctacttacaagacctggtgaaggtggaacggggctcccaggacctccactaatcaccagaacaaaatgtgcagaacctatgagaaccccaaagacattaaagattgctgaaatacaggcaagacggattgctgtggactgggaatccttgggttacaacattacgcgttgccacacttttaatgtcactatctgctaccattacttccgtggtcacaacgagagcaaggcagactgtttggacatggaccccaaagcccctcagcatgttgtgaaccatctgccaccttatacaaatgtcagcctcaagatgatcctaaccaatccagagggaaggaaggagagtgaagagacaattattcaaactgatgaagatgtgcctggtcccgtaccagtaaaatctcttcaaggaacatcctttgaaaataagatcttcttgaactggaaagaacctttggatccaaatggaatcatcactcaatatgagatcagctatagcagtataagatcatttgatcctgcagttccagtggctggacctccccagactgtatcaaatttatggaacagtacacaccatgtctttatgcatctccaccctggaaccacgtaccagtttttcataagagccagcacggtcaaaggctttggtccagccacagccatcaatgtcaccaccaatatctcagctccaactttacctgactatgaaggagttgatgcctctctcaatgaaactgccaccacaataactgtattgttgagaccagcacaagccaaaggtgctcctatcagtgcttatcagattgttgtggaagaactgcacccacaccgaaccaagagagaagccggagccatggaatgctaccaggttcctgtcacataccaaaatgccatgagtgggggtgcaccgtattactttgctgcagaactccccccgggaaacctacctgagcctgccccgttcactgtgggtgacaatcggacctaccaaggcttttggaaccctcctttggctccgcgcaaaggatacaacatctatttccaggcgatgagcagtgtggagaaggaaactaaaacccagtgcgtacgcattgctacaaaagcagcagcaacagaagaaccagaagtgatcccagatcccgccaagcagacagacagagtggtgaaaatagcaggaattagtgctggaattttggtgttcatcctccttctcctagttgtcatattaattgtaaaaaagagcaaacttgctaaaaaacgcaaagatgccatggggaatacccggcaggagatgactcacatggtgaatgcaatggatcgaagttatgctgatcagagcactctgcatgcagaagatcctctttccatcaccttcatggaccaacataactttagtccaagatatgagaaccacagtgctacagcagagtccagtcgccttctagacgtacctcgctacctctgtgaggggacggaatccccttaccagacaggacagctgcatccagccatcagggtagctgatttactgcagcacattaatctcatgaagacatcagacagctatgggttcaaagaggaatatgagagcttttttgaaggacagtcagcatcttgggatgtagctaaaaaagatcaaaatagagcaaaaaaccgatatggaaacattatagcatatgatcactccagagtgattttgcaacccgtagaggatgatccttcctcagattatattaatgccaactatattgatggctaccagagaccaagtcattacattgcaacccaaggtcccgttcatgaaacagtgtatgatttctggaggatgatttggcaagaacaatctgcttgcattgtgatggttacaaatttagttgaggttggccgggttaaatgctataaatattggcctgatgatactgaagtttatggtgacttcaaagtaacgtgtgtagaaatggaaccacttgctgaatatgtagttaggacattcaccctggaaaggagggggtacaatgaaatccgtgaagttaaacagttccatttcacgggctggcctgaccatggagtgccctaccatgctacagggctgctttcctttatccggcgagtcaagttatcaaaccctcccagtgctggccccatcgttgtacattgcagtgctggtgctggacgaactggctgctacattgtgattgacatcatgctagacatggctgaaagagagggtgttgttgatatttacaattgtgtcaaagccttaagatctcggcgtattaatatggtccagacagaggaacagtacatttttattcatgatgccattttagaagcctgcttatgtggagaaactgccatacctgtctgtgaatttaaagctgcatattttgatatgattagaatagactcccagactaactcttcacatctcaaggatgaatttcagactctgaattcagtcacccctcgactacaagctgaagactgcagtatagcgtgcctgccaaggaaccatgacaagaaccgtttcatggacatgctgccacctgacagatgtctgccttttttaattacaattgatggggagagcagtaactacatcaatgctgctcttatggacagctacaggcaaccagctgctttcatcgtcacacaataccctctgccaaacactgtaaaagacttctggagattagtgtatgattatggctgtacctccattgtgatgttaaacgaagtcgacttgtcccagggctgccctcagtactggccagaggaagggatgctacgatatggccccatccaagtggaatgtatgtcttgttcaatggactgtgatgtgatcaaccggatttttaggatatgcaatctaacaagaccacaggaaggttatctgatggtgcaacagtttcagtacctaggatgggcttctcatcgagaagtgcctggatccaaaaggtcattcttgaaactgatacttcaggtggaaaagtggcaggaggaatgcgaggaaggggaaggccggacgattatccactgcctaaatggtggcgggcgaagtggcatgttctgtgctataggcatcgttgttgaaatggtgaaacggcaaaatgttgtcgatgttttccatgcagtaaagacactgaggaacagcaagccaaacatggtggaagccccggagcaataccgtttctgctatgatgtagctttggagtacctggaatcatcttagttgggtgagactctttaaagtgcatccatgaagaaacctgtccatctattgagccagcagctgttgtacctgttacacttgtgcagaaagattttaatgtggggggtgggagacttttacatttgagaggtaaaagtattttttttatgaagttgtgtatcttaataaaaaggactgaattagtttttattactatattaaagcatcaacatttcatgccacataaattatatttaataagaaccagattgaaatgagaacgtattggtgtttgtacagtgaacatgccaccttttttctcatggtttcagtagagcagctaccacatgttgcatgagttcatactttctacgtggcatttttctccctttctaaaatgaaagctgatgaatcttaaaaggaagaagaaaagaaaagctgtgcaaattcatagtaaagttcgttttttatatgtttccagtgtagcagatctctatataaatatataaatatatataactggcttattttcttttaatgtgcaatgatggctggatcatttaaagttctttttagaaaataacataagccaaagactcaagtgtaaatatgtctatatggagaaagcacattatatttattggttacttacattccttttttgatggctaaaatactaccaccacacaatcatcttttttttcctgaagaaagctttttctttagctaaaatcaattgtaaacgatttttgtagattattttttgtatgttttagtgtaagtagaagataaactttttattcataaaccaggaagcaatgttctttatagtgattctcttgtgtacatgcttgtgaattaaatttgtgtaaaatcccttggcaattgggtcttttaatataggaccaaattaaaacattttgctgaatatgtatagtttttcacaatttcattaggtaaataatggtttggtgatcatacatgagaaatgtacacattaaaaggccttgctgacaacttgcacaatgttgaacatagcctttaagcatcatttaaattttaaaggaatggagtttttcagcctgtggcccagcactggtcaagaaaacaagatggcaacatatatgctttcagggtcaaatttgagcaaactgtaaactgtcagggtgataaaatgtttctcttgatgtttacatgcacaagctttgcgttctgactataaaaagtgtgaacaaatcaatgccagattcctgttttgcgcattgtcatgggattcttaagtgaacctttctaaatgtggtcttgttcacatgctccacgtagctgtaacttcacatcatcagcttgcagtttgtaattgactaaagcattccagtgtcctctttctagattgccagctcatgacatggtgcttataaagatttaattaaagtaagaatgaaataaagtttttataattataacagttaaaaaaaaaaaaaaaaaa

SEQ ID NO: 224 - protein, 1440 aa, Homo sapiens
MDTTAAAALPAFVALLLLSPWPLLGSAQGQFSAGGCTFDDGPGACDYHQDLYDDFEWVHVSAQEPHYLPPEMPQGSYMIVDSSDHDPGEKARLQLPTMKENDTHCIDFSYLLYSQKGLNPGTLNILVRVNKGPLANPIWNVTGFTGRDWLRAELAVSTFWPNEYQVIFEAEVSGGRSGYIAIDDIQVLSYPCDKSPHFLRLGDVEVNAGQNATFQCIATGRDAVHNKLWLQRRNGEDIPVAQTKNINHRRFAASFRLQEVTKTDQDLYRCVTQSERGSGVSNFAQLIVREPPRPIAPPQLLGVGPTYLLIQLNANSIIGDGPIILKEVEYRMTSGSWTETHAVNAPTYKLWHLDPDTEYEIRVLLTRPGEGGTGLPGPPLITRTKCAEPMRTPKTLKIAEIQARRIAVDWESLGYNITRCHTFNVTICYHYFRGHNESKADCLDMDPKAPQHVVNHLPPYTNVSLKMILTNPEGRKESEETIIQTDEDVPGPVPVKSLQGTSFENKIFLNWKEPLDPNGIITQYEISYSSIRSFDPAVPVAGPPQTVSNLWNSTHHVFMHLHPGTTYQFFIRASTVKGFGPATAINVTTNISAPTLPDYEGVDASLNETATTITVLLRPAQAKGAPISAYQIVVEELHPHRTKREAGAMECYQVPVTYQNAMSGGAPYYFAAELPPGNLPEPAPFTVGDNRTYQGFWNPPLAPRKGYNIYFQAMSSVEKETKTQCVRIATKAAATEEPEVIPDPAKQTDRVVKIAGISAGILVFILLLLVVILIVKKSKLAKKRKDAMGNTRQEMTHMVNAMDRSYADQSTLHAEDPLSITFMDQHNFSPRYENHSATAESSRLLDVPRYLCEGTESPYQTGQLHPAIRVADLLQHINLMKTSDSYGFKEEYESFFEGQSASWDVAKKDQNRAKNRYGNIIAYDHSRVILQPVEDDPSSDYINANYIDGYQRPSHYIATQGPVHETVYDFWRMIWQEQSACIVMVTNLVEVGRVKCYKYWPDDTEVYGDFKVTCVEMEPLAEYVVRTFTLERRGYNEIREVKQFHFTGWPDHGVPYHATGLLSFIRRVKLSNPPSAGPIVVHCSAGAGRTGCYIVIDIMLDMAEREGVVDIYNCVKALRSRRINMVQTEEQYIFIHDAILEACLCGETAIPVCEFKAAYFDMIRIDSQTNSSHLKDEFQTLNSVTPRLQAEDCSIACLPRNHDKNRFMDMLPPDRCLPFLITIDGESSNYINAALMDSYRQPAAFIVTQYPLPNTVKDFWRLVYDYGCTSIVMLNEVDLSQGCPQYWPEEGMLRYGPIQVECMSCSMDCDVINRIFRICNLTRPQEGYLMVQQFQYLGWASHREVPGSKRSFLKLILQVEKWQEECEEGEGRTIIHCLNGGGRSGMFCAIGIVVEMVKRQNVVDVFHAVKTLRNSKPNMVEAPEQYRFCYDVALEYLESS

SEQ ID NO: 225 - DNA, 1715 bp, Homo sapiens
  CDS (249)..(1052)
ggcctgccgagtccgcggcgttccccggctgcagccgggagggggccgaggagtgactgagccccgggctgtgcagtccgacgccgactgaggcacgagcgggtgacgctgggcctgcagcgcggagcagaaagcagaacccgcagagtcctccctgctgctgtgtggacgacacgtgggcacaggcagaagtgggccctgtgaccagctgcactggtttcgtggaaggaagctccaggactggcgggatgggctcagcctgtatcaaagtcaccaaatactttctcttcctcttcaacttgatcttctttatcctgggcgcagtgatcctgggcttcggggtgtggatcctggccgacaagagcagtttcatctctgtcctgcaaacctcctccagctcgcttaggatgggggcctatgtcttcatcggcgtgggggcagtcactatgctcatgggcttcctgggctgcatcggcgccgtcaacgaggtccgctgcctgctggggctgtactttgctttcctgctcctgatcctcattgcccaggtgacggccggggccctcttctacttcaacatgggcaagctgaagcaggagatgggcggcatcgtgactgagctcattcgagactacaacagcagtcgcgaggacagcctgcaggatgcctgggactacgtgcaggctcaggtgaagtgctgcggctgggtcagcttctacaactggacagacaacgctgagctcatgaatcgccctgaggtcacctacccctgttcctgcgaagtcaagggggaagaggacaacagcctttctgtgaggaagggcttctgcgaggcccccggcaacaggacccagagtggcaaccaccctgaggactggcctgtgtaccaggagggctgcatggagaaggtgcaggcgtggctgcaggagaacctgggcatcatcctcggcgtgggcgtgggtgtggccatcatcgagctcctggggatggtcctgtccatctgcttgtgccggcacgtccattccgaagactacagcaaggtccccaagtactgaggcagctgctatccccatctccctgcctggcccccaacctcagggctcccaggggtctccctggctccctcctccaggcctgcctcccacttcactgcgaagaccctcttgcccatcctgactgaaagtagggggctttctggggcctagcgatctctcctggcctatccgctgccagccttgagccctggctgttctgtggttcctctgctcaccgcccatcagggttctcttagcaactcagagaaaaatgctccccacagcgtccctggcgcaggtgggctggacttctacctgccctcaagggtgtgtatattgtataggggcaactgtatgaaaaattggggaggagggggccgggcgcggtggctcacgcctgtaatcccagcactttgggaggccgaggcgggtggatcacgaggtcaggagatcgagaccatcctggctaacatggtgaaaccccgtctctactaaaaatacaaaaaaaatttagccgggcgcggtggcgggcacctgtagtcccagctacttgggaggctgaggcaggagaatggtgtgaacccgggagcggaggttgcagtgagctgagatcgtgctactgcactccagcctgggggacagaaagagactccgtctcaaaaaaaaaaaaaaaaaaaaaaaaaa

SEQ ID NO: 226 - protein, 267 aa, Homo sapiens
MGSACIKVTKYFLFLFNLIFFILGAVILGFGVWILADKSSFISVLQTSSSSLRMGAYVFIGVGAVTMLMGFLGCIGAVNEVRCLLGLYFAFLLLILIAQVTAGALFYFNMGKLKQEMGGIVTELIRDYNSSREDSLQDAWDYVQAQVKCCGWVSFYNWTDNAELMNRPEVTYPCSCEVKGEEDNSLSVRKGFCEAPGNRTQSGNHPEDWPVYQEGCMEKVQAWLQENLGIILGVGVGVAIIELLGMVLSICLCRHVHSEDYSKVPKY

SEQ ID NO: 227 - DNA, 1640 bp, Homo sapiens
  CDS (249)..(977)
ggcctgccgagtccgcggcgttccccggctgcagccgggagggggccgaggagtgactgagccccgggctgtgcagtccgacgccgactgaggcacgagcgggtgacgctgggcctgcagcgcggagcagaaagcagaacccgcagagtcctccctgctgctgtgtggacgacacgtgggcacaggcagaagtgggccctgtgaccagctgcactggtttcgtggaaggaagctccaggactggcgggatgggctcagcctgtatcaaagtcaccaaatactttctcttcctcttcaacttgatcttctttatcctgggcgcagtgatcctgggcttcggggtgtggatcctggccgacaagagcagtttcatctctgtcctgcaaacctcctccagctcgcttaggatgggggcctatgtcttcatcggcgtgggggcagtcactatgctcatgggcttcctgggctgcatcggcgccgtcaacgaggtccgctgcctgctggggctgctgaagcaggagatgggcggcatcgtgactgagctcattcgagactacaacagcagtcgcgaggacagcctgcaggatgcctgggactacgtgcaggctcaggtgaagtgctgcggctgggtcagcttctacaactggacagacaacgctgagctcatgaatcgccctgaggtcacctacccctgttcctgcgaagtcaagggggaagaggacaacagcctttctgtgaggaagggcttctgcgaggcccccggcaacaggacccagagtggcaaccaccctgaggactggcctgtgtaccaggagggctgcatggagaaggtgcaggcgtggctgcaggagaacctgggcatcatcctcggcgtgggcgtgggtgtggccatcatcgagctcctggggatggtcctgtccatctgcttgtgccggcacgtccattccgaagactacagcaaggtccccaagtactgaggcagctgctatccccatctccctgcctggcccccaacctcagggctcccaggggtctccctggctccctcctccaggcctgcctcccacttcactgcgaagaccctcttgcccatcctgactgaaagtagggggctttctggggcctagcgatctctcctggcctatccgctgccagccttgagccctggctgttctgtggttcctctgctcaccgcccatcagggttctcttagcaactcagagaaaaatgctccccacagcgtccctggcgcaggtgggctggacttctacctgccctcaagggtgtgtatattgtataggggcaactgtatgaaaaattggggaggagggggccgggcgcggtggctcacgcctgtaatcccagcactttgggaggccgaggcgggtggatcacgaggtcaggagatcgagaccatcctggctaacatggtgaaaccccgtctctactaaaaatacaaaaaaaatttagccgggcgcggtggcgggcacctgtagtcccagctacttgggaggctgaggcaggagaatggtgtgaacccgggagcggaggttgcagtgagctgagatcgtgctactgcactccagcctgggggacagaaagagactccgtctcaaaaaaaaaaaaaaaaaaaaaaaaaa

SEQ ID NO: 228 - protein, 242 aa, Homo sapiens
MGSACIKVTKYFLFLFNLIFFILGAVILGFGVWILADKSSFISVLQTSSSSLRMGAYVFIGVGAVTMLMGFLGCIGAVNEVRCLLGLLKQEMGGIVTELIRDYNSSREDSLQDAWDYVQAQVKCCGWVSFYNWTDNAELMNRPEVTYPCSCEVKGEEDNSLSVRKGFCEAPGNRTQSGNHPEDWPVYQEGCMEKVQAWLQENLGIILGVGVGVAIIELLGMVLSICLCRHVHSEDYSKVPKY

SEQ ID NO: 229 - DNA, 2228 bp, Homo sapiens
  CDS (389)..(1345)
caccggacaaacgtctctggagtctctccaatgagcaagaaagcaagtcgggggtaggggaggggcctcacaccagggggtgggcgcagtccctcctccagctccttcaccctccagtagtctcgtgggtccccgagcgccagcgcgggaaccgggaaaaggaaaccgtgttgtgtacgtaagattcaggaaacgaaaccaggagccgcgggtgttggcgcaaaggttactcccagacccttttccggctgacttctgagaaggttgcgcagcagctgtgcccggcagtctagaggcgcagaagaggaagccatcgcctggccccggctctctggaccttgtctcgctcgggagcggaaacagcggcagccagagaactgttttaatcatggacaaacaaaactcacagatgaatgcttctcacccggaaacaaacttgccagttgggtatcctcctcagtatccaccgacagcattccaaggacctccaggatatagtggctaccctgggccccaggtcagctacccacccccaccagccggccattcaggtcctggcccagctggctttcctgtcccaaatcagccagtgtataatcagccagtatataatcagccagttggagctgcaggggtaccatggatgccagcgccacagcctccattaaactgtccacctggattagaatatttaagtcagatagatcagatactgattcatcagcaaattgaacttctggaagttttaacaggttttgaaactaataacaaatatgaaattaagaacagctttggacagagggtttactttgcagcggaagatactgattgctgtacccgaaattgctgtgggccatctagaccttttaccttgaggattattgataatatgggtcaagaagtcataactctggagagaccactaagatgtagcagctgttgttgtccctgctgccttcaggagatagaaatccaagctcctcctggtgtaccaataggttatgttattcagacttggcacccatgtctaccaaagtttacaattcaaaatgagaaaagagaggatgtactaaaaataagtggtccatgtgttgtgtgcagctgttgtggagatgttgattttgagattaaatctcttgatgaacagtgtgtggttggcaaaatttccaagcactggactggaattttgagagaggcatttacagacgctgataactttggaatccagttccctttagaccttgatgttaaaatgaaagctgtaatgattggtgcctgtttcctcattgacttcatgttttttgaaagcactggcagccaggaacaaaaatcaggagtgtggtagtggattagtgaaagtctcctcaggaaatctgaagtctgtatattgattgagactatctaaactcatacctgtatgaattaagctgtaaggcctgtagctctggttgtatacttttgcttttcaaattatagtttatcttctgtataactgatttataaaggtttttgtacattttttaatactcattgtcaatttgagaaaaaggacatatgagtttttgcatttattaatgaaacttcctttgaaaaactgctttgaattatgatctctgattcattgtccattttactaccaaatattaactaaggccttattaatttttatataaattatatcttgtcctattaaatctagttacaatttatttcatgcataagagctaatgttattttgcaaatgccatatattcaaaaaagctcaaagataattttctttactattatgttcaaataatattcaatatgcatattatctttaaaaagttaaatgtttttttaatcttcaagaaatcatgctacacttaacttctcctagaagctaatctataccataatattttcatattcacaagatattaaattaccaattttcaaattattgttagtaaagaacaaaatgattctctcccaaagaaagacacattttaaatactccttcactctaaaactctggtattataacttttgaaagttaatatttctacatgaaatgtttagctcttacactctatccttcctagaaaatggtaattgagattactcagatattaattaaatacaatatcatatatatattcacagagtataaacctaaataatgatctattagattcaaatatttgaaataaaaacttgatttttttgtaaaaaaaaaaaaaaaaaaa

SEQ ID NO: 230 - protein, 318 aa, Homo sapiens
MDKQNSQMNASHPETNLPVGYPPQYPPTAFQGPPGYSGYPGPQVSYPPPPAGHSGPGPAGFPVPNQPVYNQPVYNQPVGAAGVPWMPAPQPPLNCPPGLEYLSQIDQILIHQQIELLEVLTGFETNNKYEIKNSFGQRVYFAAEDTDCCTRNCCGPSRPFTLRIIDNMGQEVITLERPLRCSSCCCPCCLQEIEIQAPPGVPIGYVIQTWHPCLPKFTIQNEKREDVLKISGPCVVCSCCGDVDFEIKSLDEQCVVGKISKHWTGILREAFTDADNFGIQFPLDLDVKMKAVMIGACFLIDFMFFESTGSQEQKSGVW

SEQ ID NO: 231 - DNA, 6259 bp, Homo sapiens
  CDS (125)..(1279)
gggcgggagcagcggcggcggcggcacaggctcggggccagccgggcgcgcatccccgggcgccctgcgcggtggagagcttggcgggctgcgggtgccgcaggacaggagtggacaaagcaagatggcagggatcttagcctggttctggaacgagaggttttggctcccgcacaatgtcacctgggcggacctgaagaacacggaggaggccaccttcccgcaggctgaggacctctatctcgcttttcccctggccttctgtatcttcatggtgcggctcatcttcgagagatttgtagccaaaccgtgcgccatagccctcaacattcaggccaatggaccacaaattgctccgcccaatgccattctggaaaaggtcttcactgcaattacaaagcatcctgatgaaaagagattggaaggcctctccaagcaactggactgggatgttcgaagcattcagcgctggtttcgacaaagacgcaatcaggagaagccaagcacgctgacgaggttctgtgagagcatgtggagattttcattttacctttatgtatttacctacggagtcagattcctgaaaaagaccccctggttgtggaatacgaggcattgctggtacaactacccctatcagccactcacaactgaccttcactactattacatcctggagctgtcgttttattggtctttgatgttttctcagttcactgatatcaaaagaaaggactttggcattatgttcctgcaccaccttgtatctattttcttgattaccttttcatatgtcaacaatatggcccgagtaggaacgctggtcctttgtcttcatgattcagctgatgctcttctggaggctgccaaaatggcaaattatgccaagtttcagaaaatgtgtgatctcctgtttgttatgtttgccgtggtttttatcaccacacgactgggtatatttcctctctgggtgttaaataccacattatttgaaagctgggagatcgttggaccttacccttcctggtgggtttttaacctactgctattgctagtacaagggttgaactgcttctggtcttacttgattgtgaaaatagcttgcaaagctgtttcaagaggcaaggtgtccaaggatgatcgaagtgatattgagtctagctcagatgaggaggactcagaacctccgggaaagaatccccacactgcgacaaccaccaatgggaccagtggtaccaacgggtatctcctgactggctcctgctccatggatgattaattactcaaaactacaagtcccaagcaaagtgaactatttgttcctggaagtatttaataagttgcaaatgcagttcctttcataatatctcagcaccagaaacaaaaattaagattatcaaagcattttgaatagtgcactgccatgtgtcctgtctgtgaatgaagaagaattaccattctctctttgtaggcatgctgtatgtaattgacacaagggaacagtatttgcatttgtactgtcttagaatattatttatttttttgtatttgtaaatctgtggacaaaagagggtttcctcactccttttactcactgggctcatgacagtgaaggagatgctccatctgcttctccccctttctcttgctgtagtccaatgtgctatgagcatcagcttactttgtcacttagagcaagcaaaacccagtgcaagagtctcgttcagctctaaataggtttgctttcttttagttacagtgcccattttgaaattgcctatacagtcttagtgaccatttaaaccggacgaactaggtgtttaattttcactcttcatgttcaattagcagttcaaattaaagaagatggttattggagaacttttttgaatggttttgtattaaattgctttgaaatagatttcatttcttgtgcacacagccaagatttcttcaatgggtgtgagctagttgagggttaaccttgtaggttgcagagtgtatttgtttgtttgtttgtttttctctgtgatgaggtcagtgctctgattttgaaggaggatattcactgaagctcatagttataaacaaggaaatcactgttaagaatgggaatttgtcctgtgttctgggaataacataaagagagcaactgatttcagccaggttttgccactaccctataattagtgcagtcttatgttataaaagaaagaagttaactatatttggggacaaaaaaatatttcaagagttgataaagattacctgtgcagtgcagagcactttaatgcaaccagctttcaagaaaaagccctatctagtacttgatgttgatgtttttattttgctgagcaaaataaagccaatgggagaaagactattttaccctttgcttttctccttaaacgtaatccagatgactttcctgttactaaacactgagcagcattacactacaatgcttctttggtttccaggaatttttttcaaatggggctgtttctggaaaaatgaaaaattctattggacaatggcaatatcaacaatgaggaaaattactgaagaataagtttccataagtctcctacatagcagtgttatttatgtacagataagaaaaccatatgtcagccaaagattttatctcttcttctaacttttagtaagaggaaaaagggattataaaacccttcataaatcaagaaggccatcacttagaacgaaccccaaacaaaaatgccataatataaatgtgtgaatcagggctgtgaagacaacagcagaaatgctaacaagcgtgcagaaacaccagagagtgcgtatcctgctcagaaccattcacatttaattcaattcttggaaaaaattaaagctttttgcccacaatttgcaatctgtgggttaatagttaaaagaatgttcccaaccaaaaaattcttaccgtaatattatatcttgccctacttatttacaaaataatatgtttctgttatggtccttagtaataattgaagaggcttagaaatacatctgcttgtttattgagaaaacgatgcaaataattctgcttttagagccttgttattttatttcacaaaacaggcatatgtctaggagtgtaatttgtggatggttgagtttgtaagaacaatcataaaaggacttgttagtctccagaacatctgctaaaatgcaagtatatgtataaggtaatagcatattacagctgaaaattttgagaaggtaaaagtttcttaattaaaatatgaacatatttagcttgctttagtgtctggggcaagtcctctcaatggctaaaattaactttagagatccatgtgttcaggtttagatcatatgacactcgagcacagaagaataatttcaaggaggtcatcttgtaaattaaaggtttagaagaattgcataaaacgtagtaaatggggtctgtcattagcaaaggcaaatctaagcaatcatttttccccccagaagttacttagaaggagaactgggaacacttggggtctctctaactgatggcattcacttcacacagtcgtctatgttatccagagatttttatttcattttacattttagggcacagttctttggggctaattaaaatggggtttgcaggctttttatggtgaagaataatatatctctgtctatagctttcccatggtagcctgataaggctgagagagaaaaatatgtgcagtatctcatcctccccctgtaccaggccatagctttgaagtgtattttgtaaattcaactataggttagtcagaatgctgtttttcgttaattaacttagcctgtgttgatatctcctccttcctggtcacattcaaaccttcccagagtacaaaggggtatgtagaaaggattccagaagaagtaatactttattctctaatgttaatagcttttctggatctcttagtagggggaaagtagaaaatcgagtagaatttggcctcaggtcaataaatgatataaaaacatgtgttctatttatgtatatatatgtatgtttctccaaaaagtgataaaaccaaaatatcactgactcatccctacccatattcttttcataaaacccactcaccaggtacaatagaaacttccctccttgtttgtcagcctcctgttcatgttccccacacacctgaaggtggtagaatcttttcagcctcttagccagtgagctaaatatggctaagcacaggtcataagagcacctaaggccagcatataagccaactacagttcacctttccaaatttggtcctatggatgttgagcatagggaagcaactctcagtattttggattattcaagtgtatgtggtaaaaatgcagatgattgctgctttaccccagggtttattagcatcctacttctgctgggctgcatcattatataatgccacaggcatctagtcaaggtaaagaagccagaaaggttaggcaagaagtgagataaaatcagatcacctttgatcaaaatggttggtgaacctccacatgtccagttctgttgccaaactttccattcagagtatttggtggagtttgaatttgagcaaactaaatgccttcatcttaggtagaaagggcctgaatcttccattttatattcaaacctcattgttatttggcctaagtaaaaagtcagatttcatttccatttacctgagttcgctttaaagagcttttcaaagagagctttatagacacccacaattgtccccaatctcttcatgatgttgcattaatagttgtttttgtccctttcttggaaatgttaatgccaaagttgcctgaacattgggcggttttcttaatttgaagtataaaaattataaagagtaattccaaaggtattaaaagattgtttaacagtatgtgtggtgatgtcattatctccagagaggcttcaagaaatcctttggaaataaaaagttaaatgtttacatttcatgtggtatttcaggtcttcaggttctgattagcttacttttttcctttgtctttggctgatttctgctttgtagataaataataatagccctgagatgtttctaacatttaaataagaaaaaaatcaaatcgaagtcagcctgctggaaaagtgatcacatggcagttgcagtaacttgtatggaaagagaaaatgcaatgagcccagttactgcacttgccactaccatgctgtccatggaaggaataatcagcagttcagttgtcacaagccgcccttgaagaaaacgcagcaaaatattttaaaatgaagatattgcagtccccagagccagtgaaggtttcttttggtaaaatgaaattgtgccattgtcaaagtaccccgtagtgatgagcactgactggttcactggccacattttagttcttcataataataggccacaaaagggctctgtggtttgcctccatgtgcactggcccctccccacccctagggggcactcagtagctgctgagaaggcctgtccacgaggctgttggaacccctccaataaatacttagaggtagtgtatctgatgcttgttttcgtggagaaaattgtattggagaacttaaaacatcacgaatatttttaataggatccgcagacacccaaaggagaagcttggtcttttccaggtatttccaacttgagttcaacccaaagcctttgaaaggaatgcattaccacatgaccacatgctgagaccccatggggtctaacacgggacctaagaaagtctctgcagccagatagtacatggtgtctccacaaaactaggcattctggagattgcccagaaagggatgtgaggggaccgttaagatctgtcttgcttatctcatgcactcacattccttcagcctcctggagttcctgataaaaggaagccagggtgttgacattttttagctattgatttcccaatagcttgtggatcagttgtacacccacacttccttctctgcctaattccgtttttctggaaaaagtagtatgcccatgtatgtgtgtttttcttaacacaggtccatgaaagtttggcttcctggtttgatgtctgttgcgtggcctggaaaccagggagcagcaactattgagatggtttctgtgttcagtgaaaaattctatttcattgagacaattttttctttatccacagtaattttttgacactgtcatcatgaaactacccttaggaaaataagattacctgc

SEQ ID NO: 232 - protein, 384 aa, Homo sapiens
MAGILAWFWNERFWLPHNVTWADLKNTEEATFPQAEDLYLAFPLAFCIFMVRLIFERFVAKPCAIALNIQANGPQIAPPNAILEKVFTAITKHPDEKRLEGLSKQLDWDVRSIQRWFRQRRNQEKPSTLTRFCESMWRFSFYLYVFTYGVRFLKKTPWLWNTRHCWYNYPYQPLTTDLHYYYILELSFYWSLMFSQFTDIKRKDFGIMFLHHLVSIFLITFSYVNNMARVGTLVLCLHDSADALLEAAKMANYAKFQKMCDLLFVMFAVVFITTRLGIFPLWVLNTTLFESWEIVGPYPSWWVFNLLLLLVQGLNCFWSYLIVKIACKAVSRGKVSKDDRSDIESSSDEEDSEPPGKNPHTATTTNGTSGTNGYLLTGSCSMDD

SEQ ID NO: 233 - DNA, 1083 bp, Homo sapiens
  CDS (1)..(1083)
atggacccagaagaaacttcagtttatttggattattactatgctacgagcccaaactctgacatcagggagacccactcccatgttccttacacctctgtcttccttccagtcttttacacagctgtgttcctgactggagtgctggggaaccttgttctcatgggagcgttgcatttcaaacccggcagccgaagactgatcgacatctttatcatcaatctggctgcctctgacttcatttttcttgtcacattgcctctctgggtggataaagaagcatctctaggactgtggaggacgggctccttcctgtgcaaagggagctcctacatgatctccgtcaatatgcactgcagtgtcctcctgctcacttgcatgagtgttgaccgctacctggccattgtgtggccagtcgtatccaggaaattcagaaggacagactgtgcatatgtagtctgtgccagcatctggtttatctcctgcctgctggggttgcctactcttctgtccagggagctcacgctgattgatgataagccatactgtgcagagaaaaaggcaactccaattaaactcatatggtccctggtggccttaattttcaccttttttgtccctttgttgagcattgtgacctgctactgttgcattgcaaggaagctgtgtgcccattaccagcaatcaggaaagcacaacaaaaagctgaagaaatctataaagatcatctttattgtcgtggcagcctttcttgtctcctggctgcccttcaatactttcaagttcctggccattgtctctgggttgcggcaagaacactatttaccctcagctattcttcagcttggtatggaggtgagtggacccttggcatttgccaacagctgtgtcaaccctttcatttactatatcttcgacagctacatccgccgggccattgtccactgcttgtgcccttgcctgaaaaactatgactttgggagtagcactgagacatcagatagtcacctcactaaggctctctccaccttcattcatgcagaagattttgccaggaggaggaagaggtctgtgtcactctaa

SEQ ID NO: 234 - protein, 360 aa, Homo sapiens
MDPEETSVYLDYYYATSPNSDIRETHSHVPYTSVFLPVFYTAVFLTGVLGNLVLMGALHFKPGSRRLIDIFIINLAASDFIFLVTLPLWVDKEASLGLWRTGSFLCKGSSYMISVNMHCSVLLLTCMSVDRYLAIVWPVVSRKFRRTDCAYVVCASIWFISCLLGLPTLLSRELTLIDDKPYCAEKKATPIKLIWSLVALIFTFFVPLLSIVTCYCCIARKLCAHYQQSGKHNKKLKKSIKIIFIVVAAFLVSWLPFNTFKFLAIVSGLRQEHYLPSAILQLGMEVSGPLAFANSCVNPFIYYIFDSYIRRAIVHCLCPCLKNYDFGSSTETSDSHLTKALSTFIHAEDFARRRKRSVSL

SEQ ID NO: 235 - DNA, 3924 bp, Homo sapiens
  CDS (149)..(949)
agtgatgaactcatgctctgttctgttttctcaaagctgaagtcggctaggtttgcaaagctgtgggctgagcactcaggcaatcacactctcagaaactgcggcggctctggactgcagcctcccaaggctccatgccagacaaagcatgcgtgtcacacttgctacaatagcctggatggtttcttttgtctccaattattcacacacagcaaatattttgccagatatcgaaaatgaagatttcatcaaagactgcgttcgaatccataacaagttccgatcagaggtgaaaccaacagccagtgatatgctatacatgacttgggacccagcactagcccaaattgcaaaagcatgggccagcaattgccagttttcacataatacacggctgaagccaccccacaagctgcacccaaacttcacttcactgggagagaacatctggactgggtctgtgcccattttttctgtgtcttccgccatcacaaactggtatgacgaaatccaggactatgacttcaagactcggatatgcaaaaaagtctgtggccactacactcaggttgtttgggcagatagttacaaagttggctgcgcagttcaattttgccctaaagtttctggctttgacgctctttccaatggagcacattttatatgcaactacggaccaggagggaattacccaacttggccatataagagaggagccacctgcagtgcctgccccaataatgacaagtgtttggacaatctctgtgttaaccgacagcgagaccaagtcaaacgttactactctgttgtatatccaggctggcccatatatccacgtaacagatacacttctctctttctcattgttaattcagtaattctaatactgtctgttataattaccattttggtacagcacaagtaccctaatttagttcttttggactaatacaattcaggaaagaaaaaacccaaaaaccaacctcattcacatatggctttttttttaaccaataacaattaggtgtacttctattttaaaacatttcagaaaaaaatatatgttatagcaatactcttactcaaaagaagaaatttcctaactctatcagataaactcatctttagtataaataagcattatttgcaggttgccacaggtggacttttagtaagtaacctaacccatgtttcagcttctaaatctgcaaaatgagcaaggtacagtagcacatttttaggtgattcttagtaactccagtagccttcattagttaaaaacattattattttttgcatgctgcttcgactctaaatatctggttttccctgtctttttggtttactacttccccagattcagaacagaggagtaactaggggatctgattttagaggccttaattttctgttcatggactgttaaaagtaaaaccaaactttcaaaagggataaacctaaatatttacttgttatcattagagagggaacatcaaatgctgggacatcattactaaccaatagcatcagacactggatttaatggataatcacaatggtcgtaatgtatacaaagacttatataccactttctcgtataaatttttcaaaaaatacaataataatataatttataaagaacactcttctatgaacaaccaccaccaccaaaaaaaaaaaaagccctcagaaaatttctcacaaataaggcaactaatgcctgatatctcaaaatcctttacaaaaggagatagttctagtcaaggagttttgggtatgttacttttttttcttctttttcttttcatctgcctccatcttaagtgcaatttcttcagctgtaagagctcccagtttcttattctttgctttcttaaccttttccttgatgctggccacatcaattttagtttcagtagaagctagacaaattaaaagcacaacacatgtaatactttagattttaccaagtaaaacaaagaatatatgtttaacaaagaatatatgtttaaggcagttaacttcagagtattcttataattgaataattgaaaggtgatcacagtataaaatataaaaacacttgcctaaagcagttagaaatttcttcagattaagataaaacaaatcataaaatactttatatattagtacaagtatacataaaaatggcataaatggcataattgaaccaattactggattcaactatattaagactatttccttaaatcctacttcagactaaattattttacctacattcttttccatattttggaacttctgagtcattattttccatcttgcacattaaaataatttaaaattacatgtatcccttctcaataagtttaatcagctaaccctaagctagaggtcaaaatctacttcctctaatatcaaaacgaaaatttaaagttttccaaatattaattcaatattaattgaatattcaatgaattaattcatttaatgttagattaattcattgaatattaattcaatgaatgactaattaatagtattttaacaagattttggtatatttaacaacattttggtaataaagacaataatttgagagtgtgtggaagtccccctaatagaagccaactatctaatcaatgccaaaagtgtgaacaaaatagagaaaggaagcagtgaaaaagaatgcaactttttcttaccattcaaagtacaggatcacagcataaaagaatcataagataaaacatcaaactacccagcaacctgagaagcacagagtgttaaagcctccaccgtgtggagaaactaaattagggtaactagctattgagtatattgagtaccttcaaagcactcaactgacaggttttacagactggaaattataatacttatgacatttctaccttttatataaccaataatctaccatagaatgtagtatttttaaagctattaacaagcaatatattaaaataataatgtattatatctgtttctgacccagtctatgtacaatattgctggtgagccctctcccttcagtgtgtcactgttcactttggagggttactttaggaagaggataagtgttaccacaggggaaaaaaatgcagaagaggatgcatcagaagaaatggcatgacaatgttttctcttagtgtcttttaaatactaggttagtgcgaaagtgatttctgccatttaaaaaccacaatcactttcgcactaatagctcctgaataagacctgtcagcatcctttagtctaaggtgatgagaaatccatgttaccgatatagaagccaaactctaagccaagatcacataaagagaagaaaaagtacaacttctgataattcctctttgagaggcatgacagcagagctcagggatcttcttgcatttctacagaagatgcactggctgccctgggtttgtatctttcacaacaaagagtcttttccaagcacagaccagaggtcaggagaggactgtcaatccagtttgcactgaaataggcattagctgcctctaaattataaattatctcagccatcccttgtccttaggattagtaattaatgaaatgctaagagaactgatgaaaagatacaactgtttcttaaaaagattcagacaaatttattatgggtttacttttcctaattaataaagacttttacatcatagaaagcattaccttccttaggtttcacaattggtttttccttaggtggaataaatgctttgtttctttcctcttgtctcttactgatggcttctgcttgtttagcctacattaataaataaaaaatatatcagttaaatgtatttatagttaaataattcaagtatctatgaactttgctattcatgtgagccagacataaagtgccgtacctttattgcttccaaaaaaaaaaaaaaaaaa

SEQ ID NO: 236 - protein, 266 aa, Homo sapiens
MRVTLATIAWMVSFVSNYSHTANILPDIENEDFIKDCVRIHNKFRSEVKPTASDMLYMTWDPALAQIAKAWASNCQFSHNTRLKPPHKLHPNFTSLGENIWTGSVPIFSVSSAITNWYDEIQDYDFKTRICKKVCGHYTQVVWADSYKVGCAVQFCPKVSGFDALSNGAHFICNYGPGGNYPTWPYKRGATCSACPNNDKCLDNLCVNRQRDQVKRYYSVVYPGWPIYPRNRYTSLFLIVNSVILILSVIITILVQHKYPNLVLLD

SEQ ID NO: 237 - DNA, 2422 bp, Homo sapiens
  CDS (1)..(1182)
atgtggtggagagttctcagcttgctggcatggttccccttgcaagaggcctctctgactaaccacacagaaaccatcaccgtggaggaaggccagacgctcactctaaagtgtgtcacttctctgaggaagaactcctccctccagtggctgaccccctcagggttcaccatttttttaaatgagtatcctgctttaaaaaattccaaataccagcttcttcatcactcggccaatcagctctccatcactgtgcctaacgtaaccctgcaagatgaaggcgtgtacaagtgcttacattacagcgactctgtaagcacaaaggaagtgaaagtgattgtgctggcaactcctttcaagccaatcctggaagcttcagttatcagaaagcaaaatggagaagaacatgttgtactcatgtgctccaccatgagaagcaagccccctccgcagataacctggctacttgggaatagcatggaagtgtccggtggaacgctccatgaatttgaaactgatgggaagaaatgtaatactaccagcactctcataatccacacttatggcaaaaattcaacggtggactgcattatccgacacagaggcctgcaagggagaaaactagtagcacccttccggtttgaagatttggttactgatgaagagacagcttcagatgctctggagagaaactctctatcctctcaagacccacagcagcccaccagtactgtctcagtaacggaagattctagtacatcggagattgacaaggaagagaaagaacaaaccactcaagatcctgacttgaccaccgaagcaaatcctcagtatttaggactggcaagaaagaaaagtggcatcctgctgctcacgctggtgtccttcctcattttcatactcttcatcatagtccagctcttcatcatgaagctgaggaaagcacatgtgatatggaagaaagaaaacgaagtttcagaacacacactagaaagttacagatcaaggtcaaataatgaagaaacatcatctgaagagaaaaatggccaatcttcccaccctatgcgttgcatgaactacatcacaaagttgtactcagaagcaaaaacaaagaggaaggaaaatgtacaacattcaaaattagaagaaaagcacatccaagtaccagagagtattgtgtagtgctctctgcaatggaacatgtgatttcagggttgccgcagtgtcacctcagtggaccagcctgggggaaggagcttaattgctgagacattaataatgacctcttagtgcaatgcaagatggtgtcctcggataatgatctgccccggagctagggcagcaacatgaggaccaaaccatgcacataaagcttgtagtttaaaaaagaaaagcaaaaaaataattatgcctgacactacttcagagcaggaggattctacgaagccttggggatcagggtcagtgtgagcagctaacatcctacctcaaatggaacaggattttttgatgctttgctctaatggaactgttttaaaaatttttttttctttttaatattttcttctggtcacaaaataaagaaatttgggatgcaaagtacctaaagatctctgatcctaagaagttacttctggccaggcgcggtggctcatgcctgtaatcctagcactttgggaggctgaggtaggcagatcacttgaggtcaggagttggagaccagcctggccaacatagtgaaaccccgtctctactaaaaatgcaaaaattagccaggcgtagtggtgcgcacctgtagtctcagatacttgggaggctgagggtggagaatcgcttgaacctgggaggtggagattgcagtgagtcaagatctcaccactgcactccagcctgggcgacagagggagactctgtctcaaaaaaaaagaagttacttccaagacagacttttaacatgtaaccagcacaaagcaatgtcagggaggagtgatacatgacaataaatgagtcagatgagcaagaaggccccagaacccatgccccaaggcacaaagaggagctcagggtaggcccaaagattcgaattccttagattactaaatcacatgagcggaccttgtctgtcagataagatttttacctggaaattccatgaccaatacatgtgcaaaagaaaatgatgggttgaatttactgattattgacctaatggatggctttttaaaatgttttaataaaaagcagaatagatgtttgtttttctagtggttataccaagttatacttcctgttttcacgtgtgaaagtaacatgggacatgcctttcttttccgatcagtttatttaagctatacagcaaactttggcatttatgtggagcatttctcattgttggaatctgaataaaccaattacaaaataa

SEQ ID NO: 238 - protein, 393 aa, Homo sapiens
MWWRVLSLLAWFPLQEASLTNHTETITVEEGQTLTLKCVTSLRKNSSLQWLTPSGFTIFLNEYPALKNSKYQLLHHSANQLSITVPNVTLQDEGVYKCLHYSDSVSTKEVKVIVLATPFKPILEASVIRKQNGEEHVVLMCSTMRSKPPPQITWLLGNSMEVSGGTLHEFETDGKKCNTTSTLIIHTYGKNSTVDCIIRHRGLQGRKLVAPFRFEDLVTDEETASDALERNSLSSQDPQQPTSTVSVTEDSSTSEIDKEEKEQTTQDPDLTTEANPQYLGLARKKSGILLLTLVSFLIFILFIIVQLFIMKLRKAHVIWKKENEVSEHTLESYRSRSNNEETSSEEKNGQSSHPMRCMNYITKLYSEAKTKRKENVQHSKLEEKHIQVPESIV

SEQ ID NO: 239 - DNA, 2052 bp, Homo sapiens
  CDS (658)..(1107)
tgtgtgtgtgctcacacccacacgtgtgactttgcacgcatttgtctttgagagagagataatagtttttgtttttctttcagtagccaaagtttaaaccattgctttttctttgattctatcgcttttaaggtgatctttcttaacacaggataagaaagcagtaatgtcctaaagaatgctgttgaattaattagtatcagcctctcctacagttctggaaggatacgtggttaagtaccactcctggatgaatcagaaaaacagccacttgagcaatttcgtgttctgtggttcagatgagaatcccagttgagaaagtaagaaaatatgtgtttattcttcagctttaaattgttatatcacaaacttccttcctccttggcaagctttcttttttgacgagaagaaaattgtaataaacaacagtatgactaatagatagtcacatggttacttccagtttgcaaaatgctatttatactttgagttactcttcaaaagtggtatacctctagtttggagctgtgctgtaaaaacaagagtaacatttttatattaaagttaaataaagttacaactttgaagagagtttctgcaagacatgacacaaagctgctagcagaaaatcaaaacgctgattaaaagaagcacggtatgatgaccaaacataaaaagtgttttataattgttggtgttttaataacaactaatattattactctgatagttaaactaactcgagattctcagagtttatgcccctatgattggattggtttccaaaacaaatgctattatttctctaaagaagaaggagattggaattcaagtaaatacaactgttccactcaacatgccgacctaactataattgacaacatagaagaaatgaattttcttaggcggtataaatgcagttctgatcactggattggactgaagatggcaaaaaatcgaacaggacaatgggtagatggagctacatttaccaaatcgtttggcatgagagggagtgaaggatgtgcctacctcagcgatgatggtgcagcaacagctagatgttacaccgaaagaaaatggatttgcaggaaaagaatacactaagttaatgtctaagataatggggaaaatagaaaataacattattaagtgtaaaaccagcaaagtacttttttaattaaacaaagttcgagttttgtacctgtctggttaattctgcttacgtgtcaggctacacataaaagccacttcaaagattggcaaaaaatggttacaggtattctgctgagtttttttctttctttctttctctctctctctttctttctttctttctttctttctttttttaactgtaaaccagaaaacaattgtggggatcaaggacagacatagcacttagacaggactttcatgacccaatatggaacaatttgagtaccagaataggagattatggcctattgaacaaaatgtgaaactgggagtccacaaagacataaatggaaagatgaagtacctcctgacagagcaagaatggcactgaacaatgttatatggacaatggctattttattcaagactattacaatagggaaaagagactaggactcagtctgaactgaaatctgtcaaaacaaaggggggtggggctttaagagtgaaggtgaggaggagatcacacaccgtatgtgtttgctaactggctttacccaaaagaaaattaaactttctttgatctgtacaagttgatcaaacaaatggggtcattcttgtcatatgcaactaaaacagggtagacaggccaggggaaaaaggcactcagggcacacagcattgcttcaaaatataattctctacaaacctagttgctaaaactacctgttgtaacctaaaaccagttttatctaacagctattaaaacaacctactgtgactgcaaaactggttttacccaccactgtcacacaccaatcagaacttgccagctcctcaaaactttactagggccaataaactttctttcaaaacaataaaaaaaaaaaaaaa

SEQ ID NO: 240 - protein, 149 aa, Homo sapiens
MMTKHKKCFIIVGVLITTNIITLIVKLTRDSQSLCPYDWIGFQNKCYYFSKEEGDWNSSKYNCSTQHADLTIIDNIEEMNFLRRYKCSSDHWIGLKMAKNRTGQWVDGATFTKSFGMRGSEGCAYLSDDGAATARCYTERKWICRKRIH

SEQ ID NO: 241 - DNA, 3276 bp, Homo sapiens
  CDS (87)..(2834)
aatagactaaacccagagcctcaaagcagtgcactccgtgaaggcaaagagaacacgctgcaaaaggctttccaagaatcctcgacatggcaaggaggagctcgttccagtcgtgtcagataatatccctgttcacttttgccgttggagtcaatatctgcttaggattcactgcacatcgaattaagagagcagaaggatgggaggaaggtcctcctacagtgctatcagactccccctggaccaacatctccggatcttgcaagggcaggtgctttgaacttcaagaggctggacctcctgattgtcgctgtgacaacttgtgtaagagctataccagttgctgccatgactttgatgagctgtgtttgaagacagcccgtggctgggagtgtactaaggacagatgtggagaagtcagaaatgaagaaaatgcctgtcactgctcagaggactgcttggccaggggagactgctgtaccaattaccaagtggtttgcaaaggagagtcgcattgggttgatgatgactgtgaggaaataaaggccgcagaatgccctgcagggtttgttcgccctccattaatcatcttctccgtggatggcttccgtgcatcatacatgaagaaaggcagcaaagtcatgcctaatattgaaaaactaaggtcttgtggcacacactctccctacatgaggccggtgtacccaactaaaacctttcctaacttatacactttggccactgggctatatccagaatcacatggaattgttggcaattcaatgtatgatcctgtatttgatgccacttttcatctgcgagggcgagagaaatttaatcatagatggtggggaggtcaaccgctatggattacagccaccaagcaaggggtgaaagctggaacattcttttggtctgttgtcatccctcacgagcggagaatattaaccatattgcagtggctcaccctgccagatcatgagaggccttcggtctatgccttctattctgagcaacctgatttctctggacacaaatatggccctttcggccctgaggagagtagttatggctcaccttttactccggctaagagacctaagaggaaagttgcccctaagaggagacaggaaagaccagttgctcctccaaagaaaagaagaagaaaaatacataggatggatcattatgctgcggaaactcgtcaggacaaaatgacaaatcctctgagggaaatcgacaaaattgtggggcaattaatggatggactgaaacaactaaaactgcatcggtgtgtcaacgtcatctttgtcggagaccatggaatggaagatgtcacatgtgatagaactgagttcttgagtaattacctaactaatgtggatgatattactttagtgcctggaactctaggaagaattcgatccaaatttagcaacaatgctaaatatgaccccaaagccattattgccaatctcacgtgtaaaaaaccagatcagcactttaagccttacttgaaacagcaccttcccaaacgtttgcactatgccaacaacagaagaattgaggatatccatttattggtggaacgcagatggcatgttgcaaggaaacctttggatgtttataagaaaccatcaggaaaatgctttttccagggagaccacggatttgataacaaggtcaacagcatgcagactgtttttgtaggttatggctcaacatttaagtacaagactaaagtgcctccatttgaaaacattgaactttacaatgttatgtgtgatctcctgggattgaagccagctcctaataatgggacccatggaagtttgaatcatctcctgcgcactaataccttcaggccaaccatgccagaggaagttaccagacccaattatccagggattatgtaccttcagtctgattttgacctgggctgcacttgtgatgataaggtagagccaaagaacaagttggatgaactcaacaaacggcttcatacaaaagggtctacagaagagagacacctcctctatgggcgacctgcagtgctttatcggactagatatgatatcttatatcacactgactttgaaagtggttatagtgaaatattcctaatgccactctggacatcatatactgtttccaaacaggctgaggtttccagcgttcctgaccatctgaccagttgcgtccggcctgatgtccgtgtttctccgagtttcagtcagaactgtttggcctacaaaaatgataagcagatgtcctacggattcctctttcctccttatctgagctcttcaccagaggctaaatatgatgcattccttgtaaccaatatggttccaatgtatcctgctttcaaacgggtctggaattatttccaaagggtattggtgaagaaatatgcttcggaaagaaatggagttaacgtgataagtggaccaatcttcgactatgactatgatggcttacatgacacagaagacaaaataaaacagtacgtggaaggcagttccattcctgttccaactcactactacagcatcatcaccagctgtctggatttcactcagcctgccgacaagtgtgacggccctctctctgtgtcctccttcatcctgcctcaccggcctgacaacgaggagagctgcaatagctcagaggacgaatcaaaatgggtagaagaactcatgaagatgcacacagctagggtgcgtgacattgaacatctcaccagcctggacttcttccgaaagaccagccgcagctacccagaaatcctgacactcaagacatacctgcatacatatgagagcgagatttaactttctgagcatctgcagtacagtcttatcaactggttgtatatttttatattgtttttgtatttattaatttgaaaccaggacattaaaaatgttagtattttaatcctgtaccaaatctgacatattatgcctgaatgactccactgtttttctctaatgcttgatttaggtagccttgtgttctgagtagagcttgtaataaatactgcagcttgagtttttagtggaagcttctaaatggtgctgcagatttgatatttgcattgaggaaatattaattttccaatgcacagttgccacatttagtcctgtactgtatggaaacactgattttgtaaagttgcctttatttgctgttaactgttaactatgacagatatatttaagccttataaaccaatcttaaacataataaatcacacattcagttttttctggt

SEQ ID NO: 242 - protein, 915 aa, Homo sapiens
MARRSSFQSCQIISLFTFAVGVNICLGFTAHRIKRAEGWEEGPPTVLSDSPWTNISGSCKGRCFELQEAGPPDCRCDNLCKSYTSCCHDFDELCLKTARGWECTKDRCGEVRNEENACHCSEDCLARGDCCTNYQVVCKGESHWVDDDCEEIKAAECPAGFVRPPLIIFSVDGFRASYMKKGSKVMPNIEKLRSCGTHSPYMRPVYPTKTFPNLYTLATGLYPESHGIVGNSMYDPVFDATFHLRGREKFNHRWWGGQPLWITATKQGVKAGTFFWSVVIPHERRILTILQWLTLPDHERPSVYAFYSEQPDFSGHKYGPFGPEESSYGSPFTPAKRPKRKVAPKRRQERPVAPPKKRRRKIHRMDHYAAETRQDKMTNPLREIDKIVGQLMDGLKQLKLHRCVNVIFVGDHGMEDVTCDRTEFLSNYLTNVDDITLVPGTLGRIRSKFSNNAKYDPKAIIANLTCKKPDQHFKPYLKQHLPKRLHYANNRRIEDIHLLVERRWHVARKPLDVYKKPSGKCFFQGDHGFDNKVNSMQTVFVGYGSTFKYKTKVPPFENIELYNVMCDLLGLKPAPNNGTHGSLNHLLRTNTFRPTMPEEVTRPNYPGIMYLQSDFDLGCTCDDKVEPKNKLDELNKRLHTKGSTEERHLLYGRPAVLYRTRYDILYHTDFESGYSEIFLMPLWTSYTVSKQAEVSSVPDHLTSCVRPDVRVSPSFSQNCLAYKNDKQMSYGFLFPPYLSSSPEAKYDAFLVTNMVPMYPAFKRVWNYFQRVLVKKYASERNGVNVISGPIFDYDYDGLHDTEDKIKQYVEGSSIPVPTHYYSIITSCLDFTQPADKCDGPLSVSSFILPHRPDNEESCNSSEDESKWVEELMKMHTARVRDIEHLTSLDFFRKTSRSYPEILTLKTYLHTYESEI

SEQ ID NO: 243 - DNA, 3120 bp, Homo sapiens
  CDS (87)..(2678)
aatagactaaacccagagcctcaaagcagtgcactccgtgaaggcaaagagaacacgctgcaaaaggctttccaagaatcctcgacatggcaaggaggagctcgttccagtcgtgtcagataatatccctgttcacttttgccgttggagtcaatatctgcttaggattcactgcacatcgaattaagagagcagaaggatgggaggaaggtcctcctacagtgctatcagactccccctggaccaacatctccggatcttgcaagggcaggtgctttgaacttcaagaggctggacctcctgattgtcgctgtgacaacttgtgtaagagctataccagttgctgccatgactttgatgagctgtgtttgaagacagcccgtggctgggagtgtactaaggacagatgtggagaagtcagaaatgaagaaaatgcctgtcactgctcagaggactgcttggccaggggagactgctgtaccaattaccaagtggtttgcaaaggagagtcgcattgggttgatgatgactgtgaggaaataaaggccgcagaatgccctgcagggtttgttcgccctccattaatcatcttctccgtggatggcttccgtgcatcatacatgaagaaaggcagcaaagtcatgcctaatattgaaaaactaaggtcttgtggcacacactctccctacatgaggccggtgtacccaactaaaacctttcctaacttatacactttggccactgggctatatccagaatcacatggaattgttggcaattcaatgtatgatcctgtatttgatgccacttttcatctgcgagggcgagagaaatttaatcatagatggtggggaggtcaaccgctatggattacagccaccaagcaaggggtgaaagctggaacattcttttggtctgttgtcatccctcacgagcggagaatattaaccatattgcagtggctcaccctgccagatcatgagaggccttcggtctatgccttctattctgagcaacctgatttctctggacacaaatatggccctttcggccctgagatgacaaatcctctgagggaaatcgacaaaattgtggggcaattaatggatggactgaaacaactaaaactgcatcggtgtgtcaacgtcatctttgtcggagaccatggaatggaagatgtcacatgtgatagaactgagttcttgagtaattacctaactaatgtggatgatattactttagtgcctggaactctaggaagaattcgatccaaatttagcaacaatgctaaatatgaccccaaagccattattgccaatctcacgtgtaaaaaaccagatcagcactttaagccttacttgaaacagcaccttcccaaacgtttgcactatgccaacaacagaagaattgaggatatccatttattggtggaacgcagatggcatgttgcaaggaaacctttggatgtttataagaaaccatcaggaaaatgctttttccagggagaccacggatttgataacaaggtcaacagcatgcagactgtttttgtaggttatggctcaacatttaagtacaagactaaagtgcctccatttgaaaacattgaactttacaatgttatgtgtgatctcctgggattgaagccagctcctaataatgggacccatggaagtttgaatcatctcctgcgcactaataccttcaggccaaccatgccagaggaagttaccagacccaattatccagggattatgtaccttcagtctgattttgacctgggctgcacttgtgatgataaggtagagccaaagaacaagttggatgaactcaacaaacggcttcatacaaaagggtctacagaagagagacacctcctctatgggcgacctgcagtgctttatcggactagatatgatatcttatatcacactgactttgaaagtggttatagtgaaatattcctaatgccactctggacatcatatactgtttccaaacaggctgaggtttccagcgttcctgaccatctgaccagttgcgtccggcctgatgtccgtgtttctccgagtttcagtcagaactgtttggcctacaaaaatgataagcagatgtcctacggattcctctttcctccttatctgagctcttcaccagaggctaaatatgatgcattccttgtaaccaatatggttccaatgtatcctgctttcaaacgggtctggaattatttccaaagggtattggtgaagaaatatgcttcggaaagaaatggagttaacgtgataagtggaccaatcttcgactatgactatgatggcttacatgacacagaagacaaaataaaacagtacgtggaaggcagttccattcctgttccaactcactactacagcatcatcaccagctgtctggatttcactcagcctgccgacaagtgtgacggccctctctctgtgtcctccttcatcctgcctcaccggcctgacaacgaggagagctgcaatagctcagaggacgaatcaaaatgggtagaagaactcatgaagatgcacacagctagggtgcgtgacattgaacatctcaccagcctggacttcttccgaaagaccagccgcagctacccagaaatcctgacactcaagacatacctgcatacatatgagagcgagatttaactttctgagcatctgcagtacagtcttatcaactggttgtatatttttatattgtttttgtatttattaatttgaaaccaggacattaaaaatgttagtattttaatcctgtaccaaatctgacatattatgcctgaatgactccactgtttttctctaatgcttgatttaggtagccttgtgttctgagtagagcttgtaataaatactgcagcttgagtttttagtggaagcttctaaatggtgctgcagatttgatatttgcattgaggaaatattaattttccaatgcacagttgccacatttagtcctgtactgtatggaaacactgattttgtaaagttgcctttatttgctgttaactgttaactatgacagatatatttaagccttataaaccaatcttaaacataataaatcacacattcagttttttctggt

SEQ ID NO: 244 - protein, 863 aa, Homo sapiens
MARRSSFQSCQIISLFTFAVGVNICLGFTAHRIKRAEGWEEGPPTVLSDSPWTNISGSCKGRCFELQEAGPPDCRCDNLCKSYTSCCHDFDELCLKTARGWECTKDRCGEVRNEENACHCSEDCLARGDCCTNYQVVCKGESHWVDDDCEEIKAAECPAGFVRPPLIIFSVDGFRASYMKKGSKVMPNIEKLRSCGTHSPYMRPVYPTKTFPNLYTLATGLYPESHGIVGNSMYDPVFDATFHLRGREKFNHRWWGGQPLWITATKQGVKAGTFFWSVVIPHERRILTILQWLTLPDHERPSVYAFYSEQPDFSGHKYGPFGPEMTNPLREIDKIVGQLMDGLKQLKLHRCVNVIFVGDHGMEDVTCDRTEFLSNYLTNVDDITLVPGTLGRIRSKFSNNAKYDPKAIIANLTCKKPDQHFKPYLKQHLPKRLHYANNRRIEDIHLLVERRWHVARKPLDVYKKPSGKCFFQGDHGFDNKVNSMQTVFVGYGSTFKYKTKVPPFENIELYNVMCDLLGLKPAPNNGTHGSLNHLLRTNTFRPTMPEEVTRPNYPGIMYLQSDFDLGCTCDDKVEPKNKLDELNKRLHTKGSTEERHLLYGRPAVLYRTRYDILYHTDFESGYSEIFLMPLWTSYTVSKQAEVSSVPDHLTSCVRPDVRVSPSFSQNCLAYKNDKQMSYGFLFPPYLSSSPEAKYDAFLVTNMVPMYPAFKRVWNYFQRVLVKKYASERNGVNVISGPIFDYDYDGLHDTEDKIKQYVEGSSIPVPTHYYSIITSCLDFTQPADKCDGPLSVSSFILPHRPDNEESCNSSEDESKWVEELMKMHTARVRDIEHLTSLDFFRKTSRSYPEILTLKTYLHTYESEI

SEQ ID NO: 245 - DNA, 3212 bp, Homo sapiens
  CDS (87)..(2753)
aatagactaaacccagagcctcaaagcagtgcactccgtgaaggcaaagagaacacgctgcaaaaggctttccaagaatcctcgacatggcaaggaggagctcgttccagtcgtgtcagataatatccctgttcacttttgccgttggagtcaatatctgcttaggattcactgcacatcgaattaagagagcagaaggatgggaggaaggtcctcctacagtgctatcagactccccctggaccaacatctccggatcttgcaagggcaggtgctttgaacttcaagaggctggacctcctgattgtcgctgtgacaacttgtgtaagagctataccagttgctgccatgactttgatgagctgtgtttgaagacagcccgtggctgggagtgtactaaggacagatgtggagaagtcagaaatgaagaaaatgcctgtcactgctcagaggactgcttggccaggggagactgctgtaccaattaccaagtggtttgcaaaggagagtcgcattgggttgatgatgactgtgaggaaataaaggccgcagaatgccctgcagggtttgttcgccctccattaatcatcttctccgtggatggcttccgtgcatcatacatgaagaaaggcagcaaagtcatgcctaatattgaaaaactaaggtcttgtggcacacactctccctacatgaggccggtgtacccaactaaaacctttcctaacttatacactttggccactgggctatatccagaatcacatggaattgttggcaattcaatgtatgatcctgtatttgatgccacttttcatctgcgagggcgagagaaatttaatcatagatggtggggaggtcaaccgctatggattacagccaccaagcaaggggtgaaagctggaacattcttttggtctgttgtcatccctcacgagcggagaatattaaccatattgcagtggctcaccctgccagatcatgagaggccttcggtctatgccttctattctgagcaacctgatttctctggacacaaatatggccctttcggccctgagatgacaaatcctctgagggaaatcgacaaaattgtggggcaattaatggatggactgaaacaactaaaactgcatcggtgtgtcaacgtcatctttgtcggagaccatggaatggaagatgtcacatgtgatagaactgagttcttgagtaattacctaactaatgtggatgatattactttagtgcctggaactctaggaagaattcgatccaaatttagcaacaatgctaaatatgaccccaaagccattattgccaatctcacgtgtaaaaaaccagatcagcactttaagccttacttgaaacagcaccttcccaaacgtttgcactatgccaacaacagaagaattgaggatatccatttattggtggaacgcagatggcatgttgcaaggaaacctttggatgtttataagaaaccatcaggaaaatgctttttccagggagaccacggatttgataacaaggtcaacagcatgcagactgtttttgtaggttatggctcaacatttaagtacaagactaaagtgcctccatttgaaaacattgaactttacaatgttatgtgtgatctcctgggattgaagccagctcctaataatgggacccatggaagtttgaatcatctcctgcgcactaataccttcaggccaaccatgccagaggaagttaccagacccaattatccagggattatgtaccttcagtctgattttgacctgggctgcacttgtgatgataaggtagagccaaagaacaagttggatgaactcaacaaacggcttcatacaaaagggtctacagaagctgaaaccaggaaattcagaggcagcagaaatgaaaacaaggaaaacattaatggaaattttgaacctagaaaagagagacacctcctctatgggcgacctgcagtgctttatcggactagatatgatatcttatatcacactgactttgaaagtggttatagtgaaatattcctaatgccactctggacatcatatactgtttccaaacaggctgaggtttccagcgttcctgaccatctgaccagttgcgtccggcctgatgtccgtgtttctccgagtttcagtcagaactgtttggcctacaaaaatgataagcagatgtcctacggattcctctttcctccttatctgagctcttcaccagaggctaaatatgatgcattccttgtaaccaatatggttccaatgtatcctgctttcaaacgggtctggaattatttccaaagggtattggtgaagaaatatgcttcggaaagaaatggagttaacgtgataagtggaccaatcttcgactatgactatgatggcttacatgacacagaagacaaaataaaacagtacgtggaaggcagttccattcctgttccaactcactactacagcatcatcaccagctgtctggatttcactcagcctgccgacaagtgtgacggccctctctctgtgtcctccttcatcctgcctcaccggcctgacaacgaggagagctgcaatagctcagaggacgaatcaaaatgggtagaagaactcatgaagatgcacacagctagggtgcgtgacattgaacatctcaccagcctggacttcttccgaaagaccagccgcagctacccagaaatcctgacactcaagacatacctgcatacatatgagagcgagatttaactttctgagcatctgcagtacagtcttatcaactggttgtatatttttatattgtttttgtatttattaatttgaaaccaggacattaaaaatgttagtattttaatcctgtaccaaatctgacatattatgcctgaatgactccactgtttttctctaatgcttgatttaggtagccttgtgttctgagtagagcttgtaataaatactgcagcttgagtttttagtggaagcttctaaatggtgctgcagatttgatatttgcattgaggaaatattaattttccaatgcacagttgccacatttagtcctgtactgtatggaaacactgattttgtaaagttgcctttatttgctgttaactgttaactatgacagatatatttaagccttataaaccaatcttaaacataataaatcacacattcagttttttctggaaaaaaaaaaaaaaaaaa

SEQ ID NO: 246 - protein, 888 aa, Homo sapiens
MARRSSFQSCQIISLFTFAVGVNICLGFTAHRIKRAEGWEEGPPTVLSDSPWTNISGSCKGRCFELQEAGPPDCRCDNLCKSYTSCCHDFDELCLKTARGWECTKDRCGEVRNEENACHCSEDCLARGDCCTNYQVVCKGESHWVDDDCEEIKAAECPAGFVRPPLIIFSVDGFRASYMKKGSKVMPNIEKLRSCGTHSPYMRPVYPTKTFPNLYTLATGLYPESHGIVGNSMYDPVFDATFHLRGREKFNHRWWGGQPLWITATKQGVKAGTFFWSVVIPHERRILTILQWLTLPDHERPSVYAFYSEQPDFSGHKYGPFGPEMTNPLREIDKIVGQLMDGLKQLKLHRCVNVIFVGDHGMEDVTCDRTEFLSNYLTNVDDITLVPGTLGRIRSKFSNNAKYDPKAIIANLTCKKPDQHFKPYLKQHLPKRLHYANNRRIEDIHLLVERRWHVARKPLDVYKKPSGKCFFQGDHGFDNKVNSMQTVFVGYGSTFKYKTKVPPFENIELYNVMCDLLGLKPAPNNGTHGSLNHLLRTNTFRPTMPEEVTRPNYPGIMYLQSDFDLGCTCDDKVEPKNKLDELNKRLHTKGSTEAETRKFRGSRNENKENINGNFEPRKERHLLYGRPAVLYRTRYDILYHTDFESGYSEIFLMPLWTSYTVSKQAEVSSVPDHLTSCVRPDVRVSPSFSQNCLAYKNDKQMSYGFLFPPYLSSSPEAKYDAFLVTNMVPMYPAFKRVWNYFQRVLVKKYASERNGVNVISGPIFDYDYDGLHDTEDKIKQYVEGSSIPVPTHYYSIITSCLDFTQPADKCDGPLSVSSFILPHRPDNEESCNSSEDESKWVEELMKMHTARVRDIEHLTSLDFFRKTSRSYPEILTLKTYLHTYESEI

SEQ ID NO: 247 - DNA, 2776 bp, Homo sapiens
  CDS (61)..(1056)
agaagggcaaaaacattgactgcctcaaggtctcaagcaccagtcttcaccgcggaaagcatgttgtggctgttccaatcgctcctgtttgtcttctgctttggcccagggaatgtagtttcacaaagcagcttaaccccattgatggtgaacgggattctgggggagtcagtaactcttcccctggagtttcctgcaggagagaaggtcaacttcatcacttggcttttcaatgaaacatctcttgccttcatagtaccccatgaaaccaaaagtccagaaatccacgtgactaatccgaaacagggaaagcgactgaacttcacccagtcctactccctgcaactcagcaacctgaagatggaagacacaggctcttacagagcccagatatccacaaagacctctgcaaagctgtccagttacactctgaggatattaagacaactgaggaacatacaagttaccaatcacagtcagctatttcagaatatgacctgtgagctccatctgacttgctctgtggaggatgcagatgacaatgtctcattcagatgggaggccttgggaaacacactttcaagtcagccaaacctcactgtctcctgggaccccaggatttccagtgaacaggactacacctgcatagcagagaatgctgtcagtaatttatccttctctgtctctgcccagaagctttgcgaagatgttaaaattcaatatacagataccaaaatgattctgtttatggtttctgggatatgcatagtcttcggtttcatcatactgctgttacttgttttgaggaaaagaagagattccctatctttgtctactcagcgaacacagggccccgagtccgcaaggaacctagagtatgtttcagtgtctccaacgaacaacactgtgtatgcttcagtcactcattcaaacagggaaacagaaatctggacacctagagaaaatgatactatcacaatttactccacaattaatcattccaaagagagtaaacccactttttccagggcaactgcccttgacaatgtcgtgtaagttgctgaaaggcctcagaggaattcgggaatgacacgtcttctgatcccatgagacagaacaaagaacaggaagcttggttcctgttgttcctggcaacagaatttgaatatctaggataggatgatcacctccagtccttcggacttaaacctgcctacctgagtcaaacacctaaggataacatcatttccagcatgtggttcaaataatattttccaatccacttcaggccaaaacatgctaaagataacacaccagcacattgactctctctttgataactaagcaaatggaattatggttgacagagagtttatgatccagaagacaaccacttctctccttttagaaagcagcaggattgacttattgagaaataatgcagtgtgttggttacatgtgtagtctctggagttggatgggcccatcctgatacaagttgagcatcccttgtctgaaatgcttgggattagaaatgtttcagatttcaattttttttcagattttggaatatttgcattatatttagcggttgagtatccaaatccaaaaatccaaaattcaaaatgctccaataagcatttcccttgagtttcattgatgtcgatgcagtgctcaaaatctcagattttggagcattttggatattggatttttggatttgggatgctcaacttgtacaatgtttattagacacatctcctgggacatactgcctaaccttttggagccttagtctcccagactgaaaaaggaagaggatggtattacatcagctccattgtttgagccaagaatctaagtcatccctgactccagtgtctttgtcaccaggccctttggactctacctcagaaatatttcttggaccttccacttctcctccaactccttgaccaccatcctgtatccaaccatcaccacctctaacctgaatcctaccttaagatcagaacagttgtcctcacttttgttcttgtccctctccaacccactctccacaagatggccagagtaatgtttttaatataaattggatccttcagtttcctgcttaaaaccctgcaggtttcccaatgcactcagaaagaaatccagtttccatggccctggatggtctggcccacctccagcctcagctagcattacccttctgacactctctatgtagcctccctgatcttctttcagctcctctattaaaggaaaagttctttatgttaattatttacatcttcctgcaggcccttcctctgcctgctggggtcctcctattctttaggtttaattttaaatatgtcacctcctaagagaaaccttcccagaccactctttctaaaatgaatcttctaggctgggcatggtggctcacacctgtaatccctgtactttgggaggccaaggggggagatcacttgaggtcaggagttcaagaccagcctggccaacttggtgaaaccccgtctttactaaaaatacaaaaaaattagccaggcgtggtggtgcacccctaaaatcccagctacttgagagactgaggcaggagaatcgcttgaacccaggaggtggaggttccagtgagccaaaatcatgccaatgtattccagtctgggtgacagagtgagactctgtctcaaaaaataaataaataaaataaaatgaaatagatcttataaaaaaaaaaaaaaaaaaaaaaaaaaaaaaaaaaaaaaaaaaa

SEQ ID NO: 248 - protein, 331 aa, Homo sapiens
MLWLFQSLLFVFCFGPGNVVSQSSLTPLMVNGILGESVTLPLEFPAGEKVNFITWLFNETSLAFIVPHETKSPEIHVTNPKQGKRLNFTQSYSLQLSNLKMEDTGSYRAQISTKTSAKLSSYTLRILRQLRNIQVTNHSQLFQNMTCELHLTCSVEDADDNVSFRWEALGNTLSSQPNLTVSWDPRISSEQDYTCIAENAVSNLSFSVSAQKLCEDVKIQYTDTKMILFMVSGICIVFGFIILLLLVLRKRRDSLSLSTQRTQGPESARNLEYVSVSPTNNTVYASVTHSNRETEIWTPRENDTITIYSTINHSKESKPTFSRATALDNVV

SEQ ID NO: 249 - DNA, 1955 bp, Homo sapiens
  CDS (224)..(1315)
agcgggcgggagcgcgcgctgggcccgccttggccgccgccgctgtgctgccgctgccggggaataatctgggcggcagcgggcggcctcggctagcggccacgagccacttctgcggctgcccagagaagcaaaggtcaccagtcccaagtcgtccccctctccgccccccaggaggggcgagagggagccgcagctgatgtcagaaatacactttcgggaaatggcctctaaatcctggctgaattttttaaccttcctctgtggatcagcaataggatttcttttatgttctcagctatttagtattttgttgggagaaaaggttgacacccagcctaatgttcttcataatgatcctcatgcaaggcattcagatgataatggacagaatcatctagaaggacaaatgaacttcaatgcagattctagccaacataaagatgagaacacagacattgctgaaaacctctatcagaaagttagaattctttgctgggttatgaccggccctcaaaacctagagaaaaaggccaaacacgtcaaagctacttgggcccagcgttgtaacaaagtgttgtttatgagttcagaagaaaataaagacttccctgctgtgggactgaaaaccaaagaaggcagagatcaactatactggaaaacaattaaagcttttcagtatgttcatgaacattatttagaagatgctgattggtttttgaaagcagatgatgacacgtatgtcatactagacaatttgaggtggcttctttcaaaatacgaccctgaagaacccatttactttgggagaagatttaagccttatgtaaagcagggctacatgagtggaggagcaggatatgtactaagcaaagaagccttgaaaagatttgttgatgcatttaaaacagacaagtgtacacatagttcctccattgaagacttagcactggggagatgcatggaaattatgaatgtagaagcaggagattccagagataccattggaaaagaaacttttcatccctttgtgccagaacaccatttaattaaaggttatctacctagaacgttttggtactggaattacaactattatcctcctgtagagggtcctggttgctgctctgatcttgcagtttcttttcactatgttgattctacaaccatgtatgagttagaatacctcgtttatcatcttcgtccatatggttatttatacagatatcaacctaccttacctgaacgtatactaaaggaaattagtcaagcaaacaaaaatgaagatacaaaagtgaagttaggaaatccttgaaagaaaatcatgaatgaacaaaggtaatatgtctagcactgcactgaaaaaggacttctgcatttctgacatagaacactggaatcccagtgaggaattctaagtgaacattccttatagaaacctttcacatgaatgactataaactgaagctttaaatgagctgtgaagtgtgttaaaatgtgttttgatacagtaatatataaatatgtctatatatatgaggaacttgtgttttttaaatggtggccaggtagaggaactagaaaagagattttgttgcctgttttctgaccatctgtgttattgtcactgagaaactaaaatagtaaatttactaaaactacactgcaccatgttagtaataaacagatctgccttaaagaaaagaaaattttagaaagaaatattgttgctcagtgttgttaatatagctcaagaattgagtttatatttgcagtatgctataaatgatacccccctaccacacccacacacacagtttttgtctaatgaaaatgttgctgtgattatttataattggtagtatttcttccagaagaagctaaaataagactggcacttaccctgaagtgcattaataaaaccacactttaaaattaaaaaaaaaaaaaaaaaa

SEQ ID NO: 250 - protein, 363 aa, Homo sapiens
MASKSWLNFLTFLCGSAIGFLLCSQLFSILLGEKVDTQPNVLHNDPHARHSDDNGQNHLEGQMNFNADSSQHKDENTDIAENLYQKVRILCWVMTGPQNLEKKAKHVKATWAQRCNKVLFMSSEENKDFPAVGLKTKEGRDQLYWKTIKAFQYVHEHYLEDADWFLKADDDTYVILDNLRWLLSKYDPEEPIYFGRRFKPYVKQGYMSGGAGYVLSKEALKRFVDAFKTDKCTHSSSIEDLALGRCMEIMNVEAGDSRDTIGKETFHPFVPEHHLIKGYLPRTFWYWNYNYYPPVEGPGCCSDLAVSFHYVDSTTMYELEYLVYHLRPYGYLYRYQPTLPERILKEISQANKNEDTKVKLGNP

SEQ ID NO: 251 - DNA, 3126 bp, Homo sapiens
  CDS (656)..(2224)
cgagctgctgcccgcaggaggcaggacgcgcaggggtgggaccggcgccccagcccgtctcccggccccgggcgcgcgggaaccccgggtcctgcagcctcccgagtgcggagaggcggggccgcccgctgccgcccggctgcctgcgccccctcccgcggccccggctctgggagcggggcgccccgcgcgcgggcacacggcggccagagcgccgaggcggtaccttcagcctgcaatgagaggaacccgggagagcccccgggagccagcgaagagcttggctgctgcgtccagggctgctgctgccgccgcggctgcttgaaactcctcaaagttgagagccggctagagggtgccgcccgccgggagccggagggaaaggaagtcggaaggtgcaagagtgacagacacggacagacggacgcgcagaccttcggaaggcactgcgtaggcagcctccccggagcccacgaggctccccagcaccgactaacccaggaaagaggaaaaaatacatttaacagtgaagaggcaacacagagctccctattgtgaaataaaacccatttcaaaagttattggaaagaaagttcactggtgggaggctgagccggtggaaaagacaccgggaagagactcagaggcgaccataatgtcgttacgtgtacacactctgcccaccctgcttggagccgtcgtcagaccgggctgcagggagctgctgtgtttgctgatgatcacagtgactgtgggccctggtgcctctggggtgtgccccaccgcttgcatctgtgccactgacatcgtcagctgcaccaacaaaaacctgtccaaggtgcctgggaaccttttcagactgattaagagactggacctgagttataacagaattgggcttctggattctgagtggattccagtatcgtttgcaaagctgaacaccctaattcttcgtcataacaacatcaccagcatttccacgggcagtttttccacaactccaaatttgaagtgtcttgacttatcgtccaataagctgaagacggtgaaaaatgctgtattccaagagttgaaggttctggaagtgcttctgctttacaacaatcacatatcctatctcgatccttcagcgtttggagggctctcccagttgcagaaactctacttaagtggaaattttctcacacagtttccgatggatttgtatgttggaaggttcaagctggcagaactgatgtttttagatgtttcttataaccgaattccttccatgccaatgcaccacataaatttagtgccaggaaaacagctgagaggcatctaccttcatggaaacccatttgtctgtgactgttccctgtactccttgctggtcttttggtatcgtaggcactttagctcagtgatggattttaagaacgattacacctgtcgcctgtggtctgactccaggcactcgcgtcaggtacttctgctccaggatagctttatgaattgctctgacagcatcatcaatggttcctttcgtgcgcttggctttattcatgaggctcaggtcggggaaagactgatggtccactgtgacagcaagacaggtaatgcaaatacggatttcatctgggtgggtccagataacagactgctagagccggataaagagatggaaaacttttacgtgtttcacaatggaagtctggttatagaaagccctcgttttgaggatgctggagtgtattcttgtatcgcaatgaataagcaacgcctgttaaatgaaactgtggacgtcacaataaatgtgagcaatttcactgtaagcagatcccatgctcatgaggcatttaacacagcttttaccactcttgctgcttgcgtggccagtatcgttttggtacttttgtacctctatctgactccatgcccctgcaagtgtaaaaccaagagacagaaaaatatgctacaccaaagcaatgcccattcatcgattctcagtcctggccccgctagtgatgcctccgctgatgaacggaaggcaggtgcaggtaaaagagtggtgtttttggaacccctgaaggatactgcagcagggcagaacgggaaagtcaggctctttcccagcgaggcagtgatagctgagggcatcctaaagtccacgagggggaaatctgactcagattcagtcaattcagtgttttctgacacaccttttgtggcgtccacttaatttgtgcctatatttgtatgatgtcataatttaatctgttcatatttaactttgtgtgtggtctgcaaaataaacagcaggacagaaattgtgttgttttgttctttgaaatacaaccaaattctcttaaaatgattggtaggaaatgaggtaaagtacttcagttcctcaatgtgccatagaaagatggggttgttttccaaagtttaagttctagatcacaatatcttagcttttagcactattggtaatttcagagtaggcccaaaggtgatatgactcccattgtccctttatttaggatattgaaagaaaaaataaactttatgtattagtgtcctttaaaaatagactttgctaacttactagtaccagagttattttaaagaaaaacactagtgtccaatttcatttttaaaagatgtagaaagaagaatcaagcatcaattaattataaagcctaaagcaaagttagatttgggggttattcagccaaaattaccgttttagaccagaatgaatagactacactgataaaatgtactggataatgccacatcctatatggtgttatagaaatagtgcaaggaaagtacatttgtttgcctgtcttttcattttgtacattcttcccattctgtattcttgtacaaaagatctcattgaaaatttaaagtcatcataatttgttgccataaatatgtaagtgtcaataccaaaatgtctgagtaacttcttaaatccctgttctagcaaactaatattggttcatgtgcttgtgtatatgtaaatcttaaattatgtgaactattaaatagaccctactgtactgtgaaaaaaaaaaaaaaaaaaaaaaaaaaaaaaaaaaaaaaaaaaaaaaaaaaaaaaaaaaaaaaaaaaaa

SEQ ID NO: 252 - protein, 522 aa, Homo sapiens
MSLRVHTLPTLLGAVVRPGCRELLCLLMITVTVGPGASGVCPTACICATDIVSCTNKNLSKVPGNLFRLIKRLDLSYNRIGLLDSEWIPVSFAKLNTLILRHNNITSISTGSFSTTPNLKCLDLSSNKLKTVKNAVFQELKVLEVLLLYNNHISYLDPSAFGGLSQLQKLYLSGNFLTQFPMDLYVGRFKLAELMFLDVSYNRIPSMPMHHINLVPGKQLRGIYLHGNPFVCDCSLYSLLVFWYRRHFSSVMDFKNDYTCRLWSDSRHSRQVLLLQDSFMNCSDSIINGSFRALGFIHEAQVGERLMVHCDSKTGNANTDFIWVGPDNRLLEPDKEMENFYVFHNGSLVIESPRFEDAGVYSCIAMNKQRLLNETVDVTINVSNFTVSRSHAHEAFNTAFTTLAACVASIVLVLLYLYLTPCPCKCKTKRQKNMLHQSNAHSSILSPGPASDASADERKAGAGKRVVFLEPLKDTAAGQNGKVRLFPSEAVIAEGILKSTRGKSDSDSVNSVFSDTPFVAST

SEQ ID NO: 253 - DNA, 651 bp, Homo sapiens
  CDS (33)..(452)
gacggaaggagcggcggcgacggaggaggaggatggaggcggtggtgttcgtcttctctctcctcgattgttgcgcgctcatcttcctctcggtctacttcataattacattgtctgatttagaatgtgattacattaatgctagatcatgttgctcaaaattaaacaagtgggtaattccagaattgattggccataccattgtcactgtattactgctcatgtcattgcactggttcatcttccttctcaacttacctgttgccacttggaatatatatcgatacattatggtgccgagtggtaacatgggagtgtttgatccaacagaaatacacaatcgagggcagctgaagtcacacatgaaagaagccatgatcaagcttggtttccacttgctctgcttcttcatgtatctttatagtatgatcttagctttgataaatgactgaagctggagaagccgtggttgaagtcagcctacactacagtgcacagttgaggagccagagacttcttaaatcatccttagaaccgtgaccatagcagtatatattttcctcttggaacaaaaaactatttttgctgtatttttaccatataaagtatttaaaaaacaggaaaaaaaaaaaaaaaaaaaaaaaaaaaaaa

SEQ ID NO: 254 - protein, 139 aa, Homo sapiens
MEAVVFVFSLLDCCALIFLSVYFIITLSDLECDYINARSCCSKLNKWVIPELIGHTIVTVLLLMSLHWFIFLLNLPVATWNIYRYIMVPSGNMGVFDPTEIHNRGQLKSHMKEAMIKLGFHLLCFFMYLYSMILALIND

SEQ ID NO: 255 - DNA, 1650 bp, Homo sapiens
  CDS (1)..(1650)
atggcgcggaccctgcggccgtccccgctgtgtcctggaggcggcaaagcacaactttcctccgcttctctcctcggagccgggctcctgctgcagcccccgacgccacctccgctgctgctgctgctcttcccgctgctgctcttctccaggctctgtggtgccttagctggaccaattattgtggagccacatgtcacagcagtatggggaaagaatgtttcattaaagtgtttaattgaagtaaatgaaaccataacacagatttcatgggagaagatacatggcaaaagttcacagactgttgcagttcaccatccccaatatggattctctgttcaaggagaatatcagggaagagtcttgtttaaaaattactcacttaatgatgcaacaattactctgcataacataggattctctgattctggaaaatacatctgcaaagctgttacattcccgcttggaaatgcccagtcctctacaactgtaactgtgttagttgaacccactgtgagcctgataaaagggccagattctttaattgatggaggaaatgaaacagtagcagccatttgcatcgcagccactggaaaacccgttgcacatattgactgggaaggtgatcttggtgaaatggaatccactacaacttcttttccaaatgaaacggcaacgattatcagccagtacaagctatttccaaccagatttgctagaggaaggcgaattacttgtgttgtaaaacatccagccttggaaaaggacatccgatactctttcatattagacatacagtatgctcctgaagtttcggtaacaggatatgatggaaattggtttgtaggaagaaaaggtgttaatctcaaatgtaatgctgatgcaaatccaccacccttcaaatctgtgtggagcaggttggatggacaatggcctgatggtttattggcttcagacaatactcttcattttgtccatccattgactttcaattattctggtgtttatatctgtaaagtgaccaattcccttggtcaaagaagtgaccaaaaagtcatctacatttcagatcctcctactactaccacccttcagcctacaattcagtggcatccctcaactgctgacatcgaggatctagcaacagaacctaaaaaattgcccttcccattgtcaactttggcaacaattaaggatgacacaattgccacgatcattgctagtgtagtgggtggggctctcttcatagtacttgtaagtgttttggctggaatattctgctataggagaagacggacgtttcgtggagactactttgccaagaactacattccaccatcagatatgcaaaaagaatcacaaatagatgttcttcaacaagatgagcttgattcttacccagacagtgtaaaaaaagaaaacaaaaatccagtgaacaatctaatacgtaaagactatttagaagagcctgaaaaaactcagtggaacaatgtagaaaatctcaataggtttgaaagaccaatggattattatgaagatctaaaaatgggaatgaagtttgtcagtgatgaacattatgatgaaaacgaagatgacttagtttcacatgtagatggttccgtaatttccaggagggagtggtatgtttag

SEQ ID NO: 256 - protein, 549 aa, Homo sapiens
MARTLRPSPLCPGGGKAQLSSASLLGAGLLLQPPTPPPLLLLLFPLLLFSRLCGALAGPIIVEPHVTAVWGKNVSLKCLIEVNETITQISWEKIHGKSSQTVAVHHPQYGFSVQGEYQGRVLFKNYSLNDATITLHNIGFSDSGKYICKAVTFPLGNAQSSTTVTVLVEPTVSLIKGPDSLIDGGNETVAAICIAATGKPVAHIDWEGDLGEMESTTTSFPNETATIISQYKLFPTRFARGRRITCVVKHPALEKDIRYSFILDIQYAPEVSVTGYDGNWFVGRKGVNLKCNADANPPPFKSVWSRLDGQWPDGLLASDNTLHFVHPLTFNYSGVYICKVTNSLGQRSDQKVIYISDPPTTTTLQPTIQWHPSTADIEDLATEPKKLPFPLSTLATIKDDTIATIIASVVGGALFIVLVSVLAGIFCYRRRRTFRGDYFAKNYIPPSDMQKESQIDVLQQDELDSYPDSVKKENKNPVNNLIRKDYLEEPEKTQWNNVENLNRFERPMDYYEDLKMGMKFVSDEHYDENEDDLVSHVDGSVISRREWYV

SEQ ID NO: 257 - DNA, 1787 bp, Homo sapiens
  CDS (531)..(1544)
ttcttgacttgatgcaggcacagatttatcaagctcctcagtcaacaaacacatcaccggaagaaacatggaaggaaaggaattttaaaaggaaataccaatctctgtgcaaacaaagccttgtatattcatgtttgcaccaatctactgtgagatttatgaagaaaaacaaattgcggacaactctctatgtacacttacaaatgcctcagttgatgcttgtgggctgtttgtcagcgttctgtgataatgaacacatggacttctgtttattaaattcagttgacccctttagccaattgccaggagcctggatttttacttccaactgctgatatctgtgtaaaaattgatctacatccaccctttaaaagcattgatgaattaattagaactttagacaacaaagaaaaattgaaaaagaattctcagtaaaagcgaattcgatgttcaaaacaaactacaaagagacaagacttctctgtttactttctaagaactaatataattgctaccttaaaaaggaaaaaatgaacagcacatgtattgaagaacagcatgacctggatcactatttgtttcccattgtttacatctttgtgattatagtcagcattccagccaatattggatctctgtgtgtgtctttcctgcaagcaaagaaggaaagtgaactaggaatttacctcttcagtttgtcactatcagatttactctatgcattaactctccctttatggattgattatacttggaataaagacaactggactttctctcctgccttgtgcaaagggagtgcttttctcatgtacatgaatttttacagcagcacagcattcctcacctgcattgccgttgatcggtatttggctgttgtctaccctttgaagttttttttcctaaggacaagaagatttgcactcatggtcagcctgtccatctggatattggaaaccatcttcaatgctgtcatgttgtgggaagatgaaacagttgttgaatattgcgatgccgaaaagtctaattttactttatgctatgacaaataccctttagagaaatggcaaatcaacctcaacttgttcaggacgtgtacaggctatgcaatacctttggtcaccatcctgatctgcaaccggaaagtctaccaagctgtgcggcacaataaagccacggaaaacaaggaaaagaagagaatcataaaactacttgtcagcatcacagttacttttgtcttatgctttactccctttcatgtgatgttgctgattcgctgcattttagagcatgctgtgaacttcgaagaccacagcaattctgggaagcgaacttacacaatgtatagaatcacggttgcattaacaagtttaaattgtgttgctgatccaattctgtactgttttgtaaccgaaacaggaagatatgatatgtggaatatattaaaattctgcactgggaggtgtaatacatcacaaagacaaagaaaacgcatactttctgtgtctacaaaagatactatggaattagaggtccttgagtagaaccaaggatgttttgaagggaagggaagtttaagttatgcattattatatcatcaagattacattttgaaaaggaaatctagcatgtgaggggactaagtgttctcagagtgatgttttaatccagtccaataaaaatatcttaaaactgcattgtacagctccctccctgcgttttattaaatgatgtatattaaacaaagatcaataaaaaaaaaaaaaaaaaaaaaaaaaaaaaaaaaa

SEQ ID NO: 258 - protein, 337 aa, Homo sapiens
MNSTCIEEQHDLDHYLFPIVYIFVIIVSIPANIGSLCVSFLQAKKESELGIYLFSLSLSDLLYALTLPLWIDYTWNKDNWTFSPALCKGSAFLMYMNFYSSTAFLTCIAVDRYLAVVYPLKFFFLRTRRFALMVSLSIWILETIFNAVMLWEDETVVEYCDAEKSNFTLCYDKYPLEKWQINLNLFRTCTGYAIPLVTILICNRKVYQAVRHNKATENKEKKRIIKLLVSITVTFVLCFTPFHVMLLIRCILEHAVNFEDHSNSGKRTYTMYRITVALTSLNCVADPILYCFVTETGRYDMWNILKFCTGRCNTSQRQRKRILSVSTKDTMELEVLE

SEQ ID NO: 259 - DNA, 3030 bp, Homo sapiens
  CDS (182)..(1654)
gggagctggagccgagcgccgccgccgaagcttccgtctcgctcgctcgcgcagcggcggcagcagaggtcgcgcacagatgcgggttagactggcggggggaggaggcggaggagggaaggaagctgcatgcatgagacccacagactcttgcaagctggatgccctctgtggatgaaagatgtatcatggaatgaacccgagcaatggagatggatttctagagcagcagcagcagcagcagcaacctcagtccccccagagactcttggccgtgatcctgtggtttcagctggcgctgtgcttcggccctgcacagctcacgggcgggttcgatgaccttcaagtgtgtgctgaccccggcattcccgagaatggcttcaggacccccagcggaggggttttctttgaaggctctgtagcccgatttcactgccaagacggattcaagctgaagggcgctacaaagagactgtgtttgaagcattttaatggaaccctaggctggatcccaagtgataattccatctgtgtgcaagaagattgccgtatccctcaaatcgaagatgctgagattcataacaagacatatagacatggagagaagctaatcatcacttgtcatgaaggattcaagatccggtaccccgacctacacaatatggtttcattatgtcgcgatgatggaacgtggaataatctgcccatctgtcaaggctgcctgagacctctagcctcttctaatggctatgtaaacatctctgagctccagacctccttcccggtggggactgtgatctcctatcgctgctttcccggatttaaacttgatgggtctgcgtatcttgagtgcttacaaaaccttatctggtcgtccagcccaccccggtgccttgctctggaagtctgtccactacctccaatggtgagtcacggagatttcgtctgccacccgcggccttgtgagcgctacaaccacggaactgtggtggagttttactgcgatcctggctacagcctcaccagcgactacaagtacatcacctgccagtatggagagtggtttccttcttatcaagtctactgcatcaaatcagagcaaacgtggcccagcacccatgagaccctcctgaccacgtggaagattgtggcgttcacggcaaccagtgtgctgctggtgctgctgctcgtcatcctggccaggatgttccagaccaagttcaaggcccactttccccccagggggcctccccggagttccagcagtgaccctgactttgtggtggtagacggcgtgcccgtcatgctcccgtcctatgacgaagctgtgagtggcggcttgagtgccttaggccccgggtacatggcctctgtgggccagggctgccccttacccgtggacgaccagagccccccagcataccccggctcaggggacacggacacaggcccaggggagtcagaaacctgtgacagcgtctcaggctcttctgagctgctccaaagtctgtattcacctcccaggtgccaagagagcacccaccctgcttcggacaaccctgacataattgccagcacggcagaggaggtggcatccaccagcccaggcatcgacattgcagatgagattcctctaatggaagaagatccctaatatgggtcaagatccagatgactctcctgctccttcggggaaaggaccttgtatcttggagtgaggtcacagaaggatagagcctgggggcaaaatgtctaacttgtctacatggggaccacagttcacattatgcatctcaggctccacagtgaggctgacaaactgcaatggcagtgcttttaaatgagatttgaggattcaccaagacccatggggaaccggggcagcagggaagccctcgcgtggtcttggatgaggggtgttaaatgtgtatcgtgctgtggaacatgggacaattccacgcacatcccaccgaatcatcacgcatcccattgactggcaagtactccccgccccctctgaaagcatgtcacatcatgtaaatttgcttctaacatctgcttcaaactgtctctggactccaaatttggatgggtcagcctctgcagaaagtttgtgttgagatgctggaagaacagcagagcctcctgcaccctcagcaagggaccagctcccaaaggaaaggtccttgtgtgacatttggagaatcttccttcatccagacaactctactcgaagcaagacgaaagcaggatgtggcagttgcagtgagaaaggaaaggaaagatgggcagactctgctttctggaaatttcttcacaaagtagagctcatgaactctgtgctgtcttctggtaacatatcatcagtgtttgtattcatggtgtggcacatggatccatggcattgggtaaatctggtggtttttacacatggtcagaatgtgttcaaatacatctcatgatggagacagtaaccaaggtaatgttttgtttcagcattttaaaaagactccacttaacatttatctcagaatcatgagcctctctctagttgacaattgtcattgttcccccagccccaaattgaaccatacatttattttccaaaacagaaattgtttctgtaaacatatccgaccttcaaaagaagtgtgaggttggatttttcccccttttatttgtcctaagattccaggaggctggcctcccagcccagatagctcagccacctcacctgcctatcattcctgcattcctactttgagggtctcatcatgcccactgggtgttgttcctaagaaactgattgattaaaaaatttcccaaagtgtcctgaagtgtctcttcaaatacatgttgatctgtggagttgattcctttccttctcttggttttagacaaatgtaaacaaagctctgatccttaaaattgctatgctgatagagtggtgagggctggaagcttgatcaagtcctgtttcttcttgacacagactgattaaaaattaaaagaaaatgacagtttgaaaaa

SEQ ID NO: 260 - protein, 490 aa, Homo sapiens
MYHGMNPSNGDGFLEQQQQQQQPQSPQRLLAVILWFQLALCFGPAQLTGGFDDLQVCADPGIPENGFRTPSGGVFFEGSVARFHCQDGFKLKGATKRLCLKHFNGTLGWIPSDNSICVQEDCRIPQIEDAEIHNKTYRHGEKLIITCHEGFKIRYPDLHNMVSLCRDDGTWNNLPICQGCLRPLASSNGYVNISELQTSFPVGTVISYRCFPGFKLDGSAYLECLQNLIWSSSPPRCLALEVCPLPPMVSHGDFVCHPRPCERYNHGTVVEFYCDPGYSLTSDYKYITCQYGEWFPSYQVYCIKSEQTWPSTHETLLTTWKIVAFTATSVLLVLLLVILARMFQTKFKAHFPPRGPPRSSSSDPDFVVVDGVPVMLPSYDEAVSGGLSALGPGYMASVGQGCPLPVDDQSPPAYPGSGDTDTGPGESETCDSVSGSSELLQSLYSPPRCQESTHPASDNPDIIASTAEEVASTSPGIDIADEIPLMEEDP

SEQ ID NO: 261 - DNA, 1114 bp, Homo sapiens
  CDS (182)..(1054)
gggagctggagccgagcgccgccgccgaagcttccgtctcgctcgctcgcgcagcggcggcagcagaggtcgcgcacagatgcgggttagactggcggggggaggaggcggaggagggaaggaagctgcatgcatgagacccacagactcttgcaagctggatgccctctgtggatgaaagatgtatcatggaatgaacccgagcaatggagatggatttctagagcagcagcagcagcagcagcaacctcagtccccccagagactcttggccgtgatcctgtggtttcagctggcgctgtgcttcggccctgcacagctcacgggcgggttcgatgaccttcaagtgtgtgctgaccccggcattcccgagaatggcttcaggacccccagcggaggggttttctttgaaggctctgtagcccgatttcactgccaagacggattcaagctgaagggcgctacaaagagactgtgtttgaagcattttaatggaaccctaggctggatcccaagtgataattccatctgtgtgcaagaagattgccgtatccctcaaatcgaagatgctgagattcataacaagacatatagacatggagagaagctaatcatcacttgtcatgaaggattcaagatccggtaccccgacctacacaatatggtttcattatgtcgcgatgatggaacgtggaataatctgcccatctgtcaaggctgcctgagacctctagcctcttctaatggctatgtaaacatctctgagctccagacctccttcccggtggggactgtgatctcctatcgctgctttcccggatttaaacttgatgggtctgcgtatcttgagtgcttacaaaaccttatctggtcgtccagcccaccccggtgccttgctctggaaggaggaagacctgaacatcttttccctgtcctttatttcccacacatcaggttggcagctgctgtgctttatttttgccctgtgttaaagtcctctcccaccccagcacctacctgttcctcaactagcaccaccacatctctgttctaaatgttgttctcctgcaataaaggacgtttgaattaaacattcaaaaaaaaaaaaaaaaaa

SEQ ID NO: 262 - protein, 290 aa, Homo sapiens
MYHGMNPSNGDGFLEQQQQQQQPQSPQRLLAVILWFQLALCFGPAQLTGGFDDLQVCADPGIPENGFRTPSGGVFFEGSVARFHCQDGFKLKGATKRLCLKHFNGTLGWIPSDNSICVQEDCRIPQIEDAEIHNKTYRHGEKLIITCHEGFKIRYPDLHNMVSLCRDDGTWNNLPICQGCLRPLASSNGYVNISELQTSFPVGTVISYRCFPGFKLDGSAYLECLQNLIWSSSPPRCLALEGGRPEHLFPVLYFPHIRLAAAVLYFCPVLKSSPTPAPTCSSTSTTTSLF

SEQ ID NO: 263 - DNA, 5834 bp, Homo sapiens
  CDS (339)..(2090)
gccccgcccgcttggcgcgcgcccccgccaggtccgctctcgtcccccacccctggcgcggacggggtggttccagctcactctcctcccccgagcggcagcggcggcggcggcggcggctgctgcgggcgctgaatgagagacggtgactgttcgggtcgacgagtgctactctaggcggcggcggccgtggcggtgaagcgtgaggccggcatcgtctttccgtcctctgaggcgacggccgcggctgcacaggaataatgtatttgtggccttggacatgaggcagtcagtcctctgttgctgttaacataaggtcagggactgatgaggaaagcatggacctaatgaacgggcaggcaagcagtgtcaatattgcagctactgcttctgagaaaagtagcagctctgaatccttaagtgacaaaggctctgaattgaagaaaagctttgatgctgtggtattcgatgttcttaaggttacaccagaagaatatgcgggtcagataacattaatggatgttccagtatttaaagctattcaaccagatgagctttcaagttgtggatggaataaaaaagaaaaatatagttctgcaccaaatgcagttgccttcacaagaagattcaatcatgtaagcttttgggttgttagagagattcttcatgctcaaacattaaaaattagagcagaagttttgagccactatattaaaactgctaagaaactgtatgagctgaataaccttcatgcacttatggcagtggtttctggcctacagagtgccccaattttcaggttgactaaaacatgggcgttattaagtcgaaaagacaaaactacctttgaaaaattagaatatgtaatgagtaaagaagataactacaaaagactcagagactatataagtagcttaaagatgacaccttgcattccctatttaggtatctatttgtcagatttaacatacatcgattcagcatacccatcaactggcagcattctagaaaatgagcaaagatcaaatttaatgaataatatccttcgaataatttctgatttacagcagtcttgtgaatatgatattcccatgttgcctcatgtccaaaaatatctcaactctgttcagtatatagaagaactacaaaaatttgtggaagacgataattacaagctttcattaaagatagaaccagggacaagcaccccacgttctgctgcttccagagaagatttagtaggtcctgaagtaggagcgtctccacagagtggacgaaaaagtgtggcagctgaaggagccttgctcccacagacaccgccatcccctcggaatctgattccacatggacataggaagtgccatagtttgggttataatttcattcataaaatgaacacagcagaatttaagagtgcaacgtttccaaatgcaggaccaagacatctgttagatgatagcgtcatggagccccatgcgccatctcgaggccaagctgaaagttctactctttctagtggaatatcaataggtagcagcgatggttctgaactaagtgaagagacctcatggcctgcttttgaaaggaacagattataccattctctcggcccggtgacaagagtggcacgaaatggctatcgaagtcacatgaaggccagcagttctgcagaatcagaagatttggcagtacatttatatccaggagctgttactattcaaggtgttctcaggagaaaaactttgttaaaagaaggcaaaaagcctacagtagcatcttggacaaaatattgggcagctttgtgtgggacacagcttttttactatgctgccaaatctctaaaggctaccgaaagaaaacatttcaaatcaacatccaataagaacgtatctgtgataggatggatggtgatgatggctgatgaccctgaacatcctgatctcttcctgctgactgactctgagaaaggaaattcgtacaagtttcaagctggcaatagaatgaatgcaatgttatggtttaagcatttgagtgcagcctgccaaagtaacaaacaacaggttcctacaaacttgatgacttttgagtagaagcctgagaaaaaaagagaggtgaactgttgcttctacgtgagcatgaggacctgataaaagagcgccagctataaaccatcctgtgccaggaagagcccagaggctctgtctcagtcgttggagttctcaaccaaaaaagcactaatttcagggaatgatttgagatattcccagagaacaaattggagttgcaaaacaaactgccatgaaccatgcttcttatctcagaactgacctgtggaaaccactgccttaaaagaatgaaaggaaaaccaacatgaaacaccaaatagtgtgtgtgaatcttctggcggtgctgtgcttggaatagatcgtagctaatttgcatttcttttaactttgtaataattttagaggggggaattgccttttttagatatgctttaaaaaggaaaaacatactcttgtggattccatcaggagctggttttgaaccgaggtgaagagacttagcagggattgtaccagcagcccacctgcaaggtttgttctccctctagtagtctgcaacctcactggctttctcacagcaagagtgtaggaatgagaaatgttagtcatgtgagttcttgggtttgtttgggattgggtgggggtgtttgttttgttttggatgaggggagaatttttttaaacactaaacttctgaaatgtagtactgtaaggggaacattatttcctgcaggaggtacaaaggctgtgtgttcatttgccagacgctttttttttaaataggttccagaaaacatggttgtttctaactagggttaaagtttagctttctatatgaattcattgttggaccacagatctgcttaagtaaagagctataatcccaacctaaacttttctgagattttacaataattagatctttttccaagttaattgggttttcccttctcccagtcataggtggtttttatcatcaagacagactgatattttgtcaggatattttcttttacagtgtttgatgtgcataatgccagagttatttttttattattcattttctctctttttgttcaatatgagattcaggatcatatttgtttaaaaggtaacacatagagatgtatgtatatattttgttataagacatacaaaataattttaagagggataaaggtgaaaatatcagattctggaaattttaagtatctaaactttatacttgtatgatttaccataaacataccaaaacatttttctgaaaatttactgtcggtctctgacatgaaaccgtattttgtcagtagttgaccaagcagttttatgagaactcttctatgcaatgatgcatttaatttctaaagtaaatgttgaattattaaaaaaaaagtttgaaggtaagatgccttagaattttaatgaaaaatgacactcaaacaaaggctatatgtcgaatgttataaactcttgagacataatgaattttagcagtggcctagagtaaggtaatgctttgtgactgatatctactaatagacttctgttactttgggcctcacataaaatttctcacattcgtattcttagagaattttatacttttttattataagtattttgcccttgagtccatgaaacttcaatagaaaatattgcttatacaataattagcttaaaatccatccaaaggaaaagagaagagctttttttgagtgttaagttttttaatttagtattctgtttggaaaagatgttaagagttcaaatatgcttcttatgtaacagaaataccattatttctggggtttagtgacacaggctggagaggacaaaagtttcctgtcctgaatgatttttcaattaatgctctaagcttaacccatgttgggtaatagaaagacatagccagcagtattactacgtagaccttgcacatcttacttttgttttgcatttttaaaaatttcttaatttgtttatttctcttcagaaatagcgtttttaacagtgtatgtgcttttttaaaaagtattgtgaatgagaaccctgtggattttttttatttcatttgtttgtcataataagctaacgtagaaatgttgtaggttaaccatatctgtggaaatatgcagttggaagtcagagcctgacatcacatagttttgccaaagggagagagctaagctggaagatgtttttgatactttcggctctaaacattaatggatgtttgcgtagagtaagatagcgttcaaatttggttaatagtttatagatagacttgtggcctctgactgactaaatttcttaacagcacagaagtcgttgtttttctgtctttaaaatttattcattcagaaaattagtcattgctttttaagattattttagcatttgaagcaaattgaaaacagaaaagtgacttaaaatagtgtaggtgaattttttatctataatttaccaaataatacctgataataattcaaagaaaatatgttaccaaaatatattaaatatataggtagttcattcgtgggaagatgaatcttcttattaagcctgccctcaattgtaaataagtgactcaaaaactcaaaatgttcatcagcattcaggtcatttgtttcacccttagccaagaagaactcattagaaattcagttataatttcaatttaagcctgtttatgataagcataatgattggcatgttatatagcctgttgaaaataactacagaatgaccttccagagcactgtttttggcctcgtgcccgctctgttcaggctctgcttgtttttcagaatatgatttttacctccagacagtaagaattgaacaagaactgatcaaacacaccttcctattttgttttcttcactatgtaaatattatttgggcaaacattacaaaaagggatccaaacaatttgagtttcagtatttttttctccctaggcatgtgcttcaatttcaaatatttttttctgtgtggaaaatgccatgtaactattgcactaccttctgtgtggactgtgttggtattggttctttctgtatatcaaaagtcagggtgtttataactgcaaagtttgtataagtggctttattcctcttctagaagatttatgaggagcctaggaagcactattggtacaggaggaaaaaagaatggaaaacatgtttacagactctagctttccttattagcttaaactggggccctcaaagagcagcctgttgatcttttggccaaatgacttgagcataagtcttttatttctttttaaggttaaatcgtaaactgtatacctttactactgaaaacaaaactatagggcatcatactaattgaaaatcaatagtaatgggttccatccattagctttttaaatgaatagatctggtattgatttccttcctgtttttttgaggcacattcctttacaaccagtgtttaaaccaccacgtaatcatcttctgcaaacaaggggtgccagtgttgcctaacagaagataatctttaataaagcaaatcctctgcttcaaaggtttttgaaataattggatccctttttgaaaaggaagatgagtttaactgtgtccaggtggagtaatagtactgctgttgcatgaatagatgatacaaagcaagtgatgaggttggtatgacttctttagtgaccttttagggtttgcttttattttcctctcttttttgtattatttctttcaaacatagtaaatatatgattttacagccaaa

SEQ ID NO: 264 - protein, 583 aa, Homo sapiens
MDLMNGQASSVNIAATASEKSSSSESLSDKGSELKKSFDAVVFDVLKVTPEEYAGQITLMDVPVFKAIQPDELSSCGWNKKEKYSSAPNAVAFTRRFNHVSFWVVREILHAQTLKIRAEVLSHYIKTAKKLYELNNLHALMAVVSGLQSAPIFRLTKTWALLSRKDKTTFEKLEYVMSKEDNYKRLRDYISSLKMTPCIPYLGIYLSDLTYIDSAYPSTGSILENEQRSNLMNNILRIISDLQQSCEYDIPMLPHVQKYLNSVQYIEELQKFVEDDNYKLSLKIEPGTSTPRSAASREDLVGPEVGASPQSGRKSVAAEGALLPQTPPSPRNLIPHGHRKCHSLGYNFIHKMNTAEFKSATFPNAGPRHLLDDSVMEPHAPSRGQAESSTLSSGISIGSSDGSELSEETSWPAFERNRLYHSLGPVTRVARNGYRSHMKASSSAESEDLAVHLYPGAVTIQGVLRRKTLLKEGKKPTVASWTKYWAALCGTQLFYYAAKSLKATERKHFKSTSNKNVSVIGWMVMMADDPEHPDLFLLTDSEKGNSYKFQAGNRMNAMLWFKHLSAACQSNKQQVPTNLMTFE

SEQ ID NO: 265 - DNA, 2668 bp, Homo sapiens
  CDS (485)..(2284)
ctctctggataggaagaaatatagtagaaccctttgaaaatggatattttcacatattttcgttcagatacaaaagctggcagttactgaaataaggacttgaagttccttcctcttttttttatgtcttaagagcaggaaataaagagacagctgaaggtgtagccttgaccaactgaaagggaaatcttcatcctctgaaaaaacatatgtgattctcaaaaaacgcatctggaaaattgataaagaagcgattctgtagattctcccagcgctgttgggctctcaattccttctgtgaaggacaacatatggtgatggggaaatcagaagctttgagaccctctacacctggatatgaatcccccttctaatacttaccagaaatgaaggggatactcagggcagagttctgaatctcaaaacactctactctggcaaaggaatgaagttattggagtgatgacaggaacacgggagaacaatgctctgtttgggctggatatttctttggcttgttgcaggagagcgaattaaaggatttaatatttcaggttgttccacaaaaaaactcctttggacatattctacaaggagtgaagaggaatttgtcttattttgtgatttaccagagccacagaaatcacatttctgccacagaaatcgactctcaccaaaacaagtccctgagcacctgcccttcatgggtagtaacgacctatctgatgtccaatggtaccaacaaccttcgaatggagatccattagaggacattaggaaaagctatcctcacatcattcaggacaaatgtacccttcactttttgaccccaggggtgaataattctgggtcatatatttgtagacccaagatgattaagagcccctatgatgtagcctgttgtgtcaagatgattttagaagttaagccccagacaaatgcatcctgtgagtattccgcatcacataagcaagacctacttcttgggagcactggctctatttcttgccccagtctcagctgccaaagtgatgcacaaagtccagcggtaacctggtacaagaatggaaaactcctctctgtggaaaggagcaaccgaatcgtagtggatgaagtttatgactatcaccagggcacatatgtatgtgattacactcagtcggatactgtgagttcgtggacagtcagagctgttgttcaagtgagaaccattgtgggagacactaaactcaaaccagatattctggatcctgtcgaggacacactggaagtagaacttggaaagcctttaactattagctgcaaagcacgatttggctttgaaagggtctttaaccctgtcataaaatggtacatcaaagattctgacctagagtgggaagtctcagtacctgaggcgaaaagtattaaatccactttaaaggatgaaatcattgagcgtaatatcatcttggaaaaagtcactcagcgtgatcttcgcaggaagtttgtttgctttgtccagaactccattggaaacacaacccagtccgtccaactgaaagaaaagagaggagtggtgctcctgtacatcctgcttggcaccatcgggaccctggtggccgtgctggcggcgagtgccctcctctacaggcactggattgaaatagtgctgctgtaccggacctaccagagcaaggatcagacgcttggggataaaaaggattttgatgctttcgtatcctatgcaaaatggagctcttttccaagtgaggccacttcatctctgagtgaagaacacttggccctgagcctatttcctgatgttttagaaaacaaatatggatatagcctgtgtttgcttgaaagagatgtggctccaggaggagtgtatgcagaagacattgtgagcattattaagagaagcagaagaggaatatttatcttgagccccaactatgtcaatggacccagtatctttgaactacaagcagcagtgaatcttgccttggatgatcaaacactgaaactcattttaattaagttctgttacttccaagagccagagtctctacctcatctcgtgaaaaaagctctcagggttttgcccacagttacttggagaggcttaaaatcagttcctcccaattctaggttctgggccaaaatgcgctaccacatgcctgtgaaaaactctcagggattcacgtggaaccagctcagaattacctctaggatttttcagtggaaaggactcagtagaacagaaaccactgggaggagctcccagcctaaggaatggtgaaatgagccctggagccccctccagtccagtccctgggatagagatgttgctggacagaactcacagctctgtgtgtgtgtgttcaggctgataggaaattcaaagagtctcctgccagcaccaagcaagcttgatggacaatggagtgggattgagactgtggtttagagcctttgatttcctggactggactgacggcgagtgaattctctagaccttgggtactttcagtacacaacacccctaagatttcccagtggtccgagcagaatcagaaaatacagctacttctgccttatggctagggaactgtcatgtctaccatgtattgtacatatgactttatgtatacttgcaatcaaataaatattattttattagaaa

SEQ ID NO: 266 - protein, 599 aa, Homo sapiens
MLCLGWIFLWLVAGERIKGFNISGCSTKKLLWTYSTRSEEEFVLFCDLPEPQKSHFCHRNRLSPKQVPEHLPFMGSNDLSDVQWYQQPSNGDPLEDIRKSYPHIIQDKCTLHFLTPGVNNSGSYICRPKMIKSPYDVACCVKMILEVKPQTNASCEYSASHKQDLLLGSTGSISCPSLSCQSDAQSPAVTWYKNGKLLSVERSNRIVVDEVYDYHQGTYVCDYTQSDTVSSWTVRAVVQVRTIVGDTKLKPDILDPVEDTLEVELGKPLTISCKARFGFERVFNPVIKWYIKDSDLEWEVSVPEAKSIKSTLKDEIIERNIILEKVTQRDLRRKFVCFVQNSIGNTTQSVQLKEKRGVVLLYILLGTIGTLVAVLAASALLYRHWIEIVLLYRTYQSKDQTLGDKKDFDAFVSYAKWSSFPSEATSSLSEEHLALSLFPDVLENKYGYSLCLLERDVAPGGVYAEDIVSIIKRSRRGIFILSPNYVNGPSIFELQAAVNLALDDQTLKLILIKFCYFQEPESLPHLVKKALRVLPTVTWRGLKSVPPNSRFWAKMRYHMPVKNSQGFTWNQLRITSRIFQWKGLSRTETTGRSSQPKEW

SEQ ID NO: 267 - DNA, 4601 bp, Homo sapiens
atttgaggctgactggggagaaagctgcctggaggaagctgctggggtgcggggggctgagggatttggctccccgccctctcccctagatggcggagaaatcgggctagctggaagggcgcagctcctctcccagagctcattctggagtcggagaactgggagagcggcccccgaggcggagcctccctcccgccccgagtcgcgctgccccccacctgggggagaggggcgggcgccgcgctgccttccctccgcgcctcggccgcgtggcttgcggcttattttcccagctggcaagcgtcgcgctgcagacaagggaatgcctgtggtcctgcgtgttccgaagttcaggggccccctgatcccgctgagccccctccaggagcgaaagggttaagaatgataaggaagaagaggaagcgaagcgcgccccccggcccatgccgcagccacgggcccagacccgccacggcgcccgcgccgccgccctcgccggagcccacgagacctgcatggacgggcatgggcttgagagcagcaccttccagcgccgccgctgccgccgccgaggttgagcagcgccgcagccccgggctctgccccccgccgctggagctgctgctgctgctgctgttcagcctcgggctgctccacgcaggtgactgccaacagccagcccaatgtcgaatccagaaatgcaccacggacttcgtgtccctgacttctcacctgaactctgccgttgacggctttgactctgagttttgcaaggccttgcgtgcctatgctggctgcacccagcgaacttcaaaagcctgccgtggcaacctggtataccattctgccgtgttgggtatcagtgacctcatgagccagaggaattgttccaaggatggacccacatcctctaccaaccccgaagtgacccatgatccttgcaactatcacagccacgctggagccagggaacacaggagaggggaccagaaccctcccagttaccttttttgtggcttgtttggagatcctcacctcagaactttcaaggataacttccaaacatgcaaagtagaaggggcctggccactcatagataataattatctttcagttcaagtgacaaacgtacctgtggtccctggatccagtgctactgctacaaataagatcactattatcttcaaagcccaccatgagtgtacagatcagaaagtctaccaagctgtgacagatgacctgccggccgcctttgtggatggcaccaccagtggtggggacagcgatgccaagagcctgcgtatcgtggaaagggagagtggccactatgtggagatgcacgcccgctatatagggaccacagtgtttgtgcggcaggtgggtcgctacctgacccttgccatccgtatgcctgaagacctggccatgtcctacgaggagagccaggacctgcagctgtgcgtgaacggctgccccctgagtgaacgcatcgatgacgggcagggccaggtgtctgccatcctgggacacagcctgcctcgcacctccttggtgcaggcctggcctggctacacactggagactgccaacactcaatgccatgagaagatgccagtgaaggacatctatttccagtcctgtgtcttcgacctgctcaccactggtgatgccaactttactgccgcagcccacagtgccttggaggatgtggaggccctgcacccaaggaaggaacgctggcacattttccccagcagtggcaatgggactccccgtggaggcagtgatttgtctgtcagtctaggactcacctgcttgatccttatcgtgtttttgtaggggttgtcttttgttttggttttttattttttgtctataacaaaattttaaaatatatattgtcataatatattgagtaaaagagtatatatgtatataccatgtatatgacaggatgtttgtcctgggacacccaccagattgtacatactgtgtttggctgttttcacatatgttggatgtagtgttctttgattgtatcaattttgttttgcagttctgtgaaatgttttataatgtccctgcccagggacctgttagaaagcactttattttttatatattaaatatttatgtgtgtgcttggttgatatgtatagtacatatacacagacatccatatgcagcgtttcctttgaaggtgaccagttgtttgtagctattcttggctgtaccttcctgccctttcccattgctactgatttgccacggtgtgcagcttttactcgccaccttccggtggagctgcctcgttcctttgaactatgccctcacccttctgccctcacttgatttgaaagggtcgttaactctcccttacaggtgctttgactcttaaacgctgatcttaagaagctctcttcatctaagagctgttactttttcagaagggggggtattattggtattctgattactctcaattctaattgttatatatttgagcccatacagtgtattaggttgaaccatagaaactgctattctcgtaggtcaaaagggtctagtgatggaagttttgtagataagtaccaggcatctcagtaactcctagactttttctcatcccatgccccgttttaaattgtcagttttccctctgactcttctgtgttaaaacatgaaactataaatttagtaattatcatgccttgctctttttaatctatatgactgatgcaagcccctcttcttaaccgtttcttggctttgagcccagaaacacagctctccctgtctccaactccagtaagccctcctcagcctcaccttacgaatccaaagaactggggtttgttaggttctttctctaatgtagaggcccagatcccatcacaaagtttttcattcttccttgtccaccatgatcttcatcacagtctttgatatgtctgcatgcaaagtggaacagagttgggcggcaatgacagaagagcttccttggcctgactcggtgtgcggccacttcggcactgcttaatccagatattcttgttaactaagcattgtgcttcccaggtggtctgaagtcaggtactctctctctcaacacctgtagttgaatatgatttggtcagttgctcgttgtaacttggagaaattcctataaagtaagatctccttgcctcttccatccattgttggcacccccttgcaaaaggaaaagaacagcaaaagtcaggagcagtaatctgagaaagttaactccaggataggtaggtttctattgttatagctagatgtaaatctttagttccaagaagtgatagagtttctgctttaataatttgttgataagtttacataaacagaaataaaagatactatctttaccgtagtagttcaggccaagattatgcttagttttagttctccaggtagttacttttgccatgtcctattgatcagtgacactgccagaggcccataccggcaagaggaagaggacgtcattttgtaaagtttaacttcttagcgaactgatgtgccacccagtcacagagtggagttgtgaattcatgtagaggtggcaaacctctaccttgtgttgatgagagaataatcttgggcagtctgggaaaataaggaaggcatctccttcttactcatggagattcaactatagagagttgaaacctaaacccgccttccttttatagaagctggactagagacggactgaccatcagctctgaactgtggctttttttgttcacctatgatgccatgtaccaaattcagaagctatcgttaataatttgttttataattgagtagtacaagcgaggaaaaaatacggaggataaccactatttttgtgcaaataatatgaaagtgaagtaaaagcaatagaagaaatttctataggatctgggtttagagtgtgtatcattaataaatatacctttgctcttttcagggaaaataacaaccacccttactgatagttgggaaaagaagattgggttattttgccatatcatttagctggaagtgacatttaaaagcaccctgcatcactagtaatagtgtattttgctattctgcccttgtaatcggtgtccctgtaaaacaatccccacagattactttcagaaatagatgtatttctctacgtaagggccaggtttattttctccttttttgagatttctagaaaaaatgctgcttgcacatgttggttcttgaaaccttagctagaagaatttcaggtcataccaacatgtggataggctatagctgttcagaggtctcctgggggagcttaaaacgggggaaacactggttttcacagatgctccacatggctgtctttaaaagactcaaaacttttttttgtcctctttgttatgcttggaagctcccccccccccaacagtgtgtcgagtctttgcaaagaaacctttagatgtggttcatagatatatgaatacgtatctgtgtaaaacagtgagtgtgcagtgtgtaaatactttaaattattatgctagaaaaataaagttacataccttgctgtggaaaaaaaaaaaaaaaaaaaaaaa

SEQ ID NO: 268 - protein, 478 aa, homo sapiens
MIRKKRKRSAPPGPCRSHGPRPATAPAPPPSPEPTRPAWTGMGLRAAPSSAAAAAAEVEQRRSPGLCPPPLELLLLLLFSLGLLHAGDCQQPAQCRIQKCTTDFVSLTSHLNSAVDGFDSEFCKALRAYAGCTQRTSKACRGNLVYHSAVLGISDLMSQRNCSKDGPTSSTNPEVTHDPCNYHSHAGAREHRRGDQNPPSYLFCGLFGDPHLRTFKDNFQTCKVEGAWPLIDNNYLSVQVTNVPVVPGSSATATNKITIIFKAHHECTDQKVYQAVTDDLPAAFVDGTTSGGDSDAKSLRIVERESGHYVEMHARYIGTTVFVRQVGRYLTLAIRMPEDLAMSYEESQDLQLCVNGCPLSERIDDGQGQVSAILGHSLPRTSLVQAWPGYTLETANTQCHEKMPVKDIYFQSCVFDLLTTGDANFTAAAHSALEDVEALHPRKERWHIFPSSGNGTPRGGSDLSVSLGLTCLILIVFL

SEQ ID NO: 269 - DNA, 4208 bp, Homo sapiens
ggcggcgcaggggcggggctttacggacgcaagcacgtcgaagcgctgctcctggagccgcggagggtgcgggtttggctgcggtggtttctgtggcggttgctgtggcggagtttggaggttggagagaaatccaggtactcactagactggtaccttctgccaccatgggggagcttttccggagtgaagaaatgacactggcccagctttttctacagtcagaggctgcttattgttgtgtcagtgaattaggagaacttggaaaggttcagtttcgtgacttaaatccagatgtgaatgttttccaacggaaatttgtgaatgaagttagaagatgtgaagaaatggatcgaaagcttcgatttgttgagaaagagataagaaaagctaacattccgattatggacaccggtgaaaacccagaggttcccttcccccgggacatgattgacttagaggccaattttgagaagattgaaaatgaactgaaggaaatcaacacaaaccaggaagctctgaagagaaacttcctggaactgaccgaattaaaatttatacttcgcaaaactcagcaattttttgatgaggctgaattgcatcatcagcagatggcggatccagacttgttggaagagtcctcatccctcttggagccaagtgagatgggaagaggcactcctttaagacttggcttcgtggctggtgtcattaaccgggagcgcatccctacttttgagcgcatgctttggcgggtatgccggggaaatgtgttcctgcgacaggctgaaatcgagaaccccctggaggatcctgtgactggcgactacgtgcacaagtctgtgtttatcattttcttccaaggcgatcagctgaaaaacagagtcaagaaaatctgtgaagggttccgagcctcactctatccctgtcctgagacaccacaggagaggaaggaaatggcttctggagtgaataccaggattgatgatctccaaatggttctgaatcaaacggaggatcaccgccagagggttctgcaggcagctgctaagaacatccgtgtctggttcatcaaagtgcggaagatgaaggccatctatcacaccctgaacctgtgcaacatagatgtgactcagaaatgcttgattgcagaggtctggtgccctgtcaccgaccttgactccatccagtttgcactcagaaggggcacggaacacagtggttccactgtaccttccattttgaacaggatgcagacaaaccagactcccccaacctataacaaaaccaacaagtttacctatggctttcagaacatagtagatgcttatggaattggaacttaccgagagataaatccagctccgtatactattatcacgttcccttttctatttgctgtgatgtttggagacttcggtcatggcattttaatgaccctttttgctgtgtggatggtactgagggagagccggatcctttcccagaagaatgagaatgagatgtttagcactgtgttcagtggtcgatacattattttattgatgggtgtgttctccatgtacactggcctcatctacaatgattgcttttccaagtctcttaatatctttgggtcatcctggagtgtacggccgatgtttacttataattggactgaagagacgcttcgggggaaccctgttctacagctgaacccagccctccctggagtgtttggtggaccatacccttttggcattgatccaatttggaacattgctaccaataaactgacgttcttgaactcctttaagatgaagatgtctgttatccttggtatcatccatatgctgtttggagtcagcctgagtctgttcaaccatatctatttcaagaagcccctgaatatctactttggatttattcctgaaataatcttcatgacctctttgtttggctatttggttatccttattttttacaagtggacggcctatgatgctcatacctctgagaatgcaccaagccttctgatccatttcataaacatgttcctcttttcctacccagagtctggttattcaatgttgtattctggacagaaaggaattcagtgtttcctggtagtggttgcactactgtgtgtaccttggatgctgctgtttaaaccattggtccttcgccgtcagtatttgaggagaaagcatttgggaactctcaactttggtgggatcagggtgggcaacggaccgacagaggaggatgctgagattattcagcatgaccagctctccacccactcagaggacgcagacgagtttgactttggggacaccatggtccaccaggccatccacaccatcgagtactgcctgggctgcatctccaacactgcctcctacttgcggctctgggccctcagcctcgctcatgcgcagctgtctgaggtgctttggaccatggtgatccacatcggcctgagcgtgaagagcttggcgggaggtttggtgctgttcttcttcttcactgcctttgccaccctgaccgtggccatcctcctgatcatggagggcctctcggcctttctccacgcactgcgcttacactgggttgagttccagaataaattctacagcgggaccggtttcaagttcttacccttctccttcgagcatattcgggaagggaagtttgaagagtgagtccctgtgagggccgtgtgccccatgctaccctccccgcctccctccacagtgatcagctgtgcctctctgcctgttggttgtgatctgtgggcaccagctcattcgtgtcaccctgtctgtgagtcatttagatagaatagtcctccttgggtctcccaccacccctagctttgtgtgtagtgtagtgattttctggctgtcactcatactcactgggcaccagccttgccctcttagcctccatccatccagacagcccttcccacctcctggtggtgagccagtctgcattcccacgccatcccaaagccctttcatcttccccgtgcattgtagatggaaggagcacccatgccattcacatctagactttgagttccctgcatctgccaccgtagtttctagcaggagtagtggggggagtaatacagattcttccctagaaggggacactggtaacatgtcccactcttggattagcaggggtgggtccaggaagatgatatttgcgtcttttgcccacccccctggcattcagctggacccaactaggccatcatgagtggcttctccctgtcatccccaggggtcataggatatctacaccgcctttctgaccccaccctgcactcccatcctttcctctctccccgttcatgccctgcactacatagcacagccgggatgcttggaacagaggccttggctgctccgcagtgcacagggcttccctctctcggggttggcttcttcccaggccttgcatgggccctgcccacaagcacaccctcaggccgagggtgcagactgatgctcttccctgatggagaccctgagatcttccccacccccaatcatgatgtcttcagtgtgggactggggtcctcttggttctgcctgcagcctgcctggctccgcccctagtgccccctcctcaccacactggccccaggtctcaggaggggtgtcctgggcagggaaggtcagtgtcactgatggtttgctgtttggaagccattggcagggctgccgtgcatgtggctgtgagggctgcacagtcctgccaaggggcttcctccttgtcaccccgaaccttgtaatcgtgtgctggcgtggcagccctggctaagttaatccccaccgctttcagtggtagaaagaattccctgagtgggccaggctggtgccctcctcctaccctggcttttctgagtgagctgcctggagccctcatcccctctcccaggctgggctggccctgggcggggccactgtgtgctggcccactgtgacctgacccgaccttgtgcagcccccctgccctggtgtcctgggttttcgtgatgatctttgctctgtttccagtggggtttgaagcagagttcagggaaccctgcccaaggtcctcctgttcagacattcctatgttgaataaagtatgtttgacttccccggaaaaaaaaaaaaaaaaaaaaaaaaaaaaaaaaaaaaaaaaaaaaaaaaaaaaaaaaaaaaaaaaaa

SEQ ID NO: 270 - protein, 838 aa, Homo sapiens
MGELFRSEEMTLAQLFLQSEAAYCCVSELGELGKVQFRDLNPDVNVFQRKFVNEVRRCEEMDRKLRFVEKEIRKANIPIMDTGENPEVPFPRDMIDLEANFEKIENELKEINTNQEALKRNFLELTELKFILRKTQQFFDEAELHHQQMADPDLLEESSSLLEPSEMGRGTPLRLGFVAGVINRERIPTFERMLWRVCRGNVFLRQAEIENPLEDPVTGDYVHKSVFIIFFQGDQLKNRVKKICEGFRASLYPCPETPQERKEMASGVNTRIDDLQMVLNQTEDHRQRVLQAAAKNIRVWFIKVRKMKAIYHTLNLCNIDVTQKCLIAEVWCPVTDLDSIQFALRRGTEHSGSTVPSILNRMQTNQTPPTYNKTNKFTYGFQNIVDAYGIGTYREINPAPYTIITFPFLFAVMFGDFGHGILMTLFAVWMVLRESRILSQKNENEMFSTVFSGRYIILLMGVFSMYTGLIYNDCFSKSLNIFGSSWSVRPMFTYNWTEETLRGNPVLQLNPALPGVFGGPYPFGIDPIWNIATNKLTFLNSFKMKMSVILGIIHMLFGVSLSLFNHIYFKKPLNIYFGFIPEIIFMTSLFGYLVILIFYKWTAYDAHTSENAPSLLIHFINMFLFSYPESGYSMLYSGQKGIQCFLVVVALLCVPWMLLFKPLVLRRQYLRRKHLGTLNFGGIRVGNGPTEEDAEIIQHDQLSTHSEDADEFDFGDTMVHQAIHTIEYCLGCISNTASYLRLWALSLAHAQLSEVLWTMVIHIGLSVKSLAGGLVLFFFFTAFATLTVAILLIMEGLSAFLHALRLHWVEFQNKFYSGTGFKFLPFSFEHIREGKFEE

SEQ ID NO: 271 - DNA, 4205 bp, Homo sapiens
ggcggcgcaggggcggggctttacggacgcaagcacgtcgaagcgctgctcctggagccgcggagggtgcgggtttggctgcggtggtttctgtggcggttgctgtggcggagtttggaggttggagagaaatccaggtactcactagactggtaccttctgccaccatgggggagcttttccggagtgaagaaatgacactggcccagctttttctacagtcagaggctgcttattgttgtgtcagtgaattaggagaacttggaaaggttcagtttcgtgacttaaatccagatgtgaatgttttccaacggaaatttgtgaatgaagttagaagatgtgaagaaatggatcgaaagcttcgatttgttgagaaagagataagaaaagctaacattccgattatggacaccggtgaaaacccagaggttcccttcccccgggacatgattgacttagaggccaattttgagaagattgaaaatgaactgaaggaaatcaacacaaaccaggaagctctgaagagaaacttcctggaactgaccgaattaaaatttatacttcgcaaaactcagcaattttttgatgagatggcggatccagacttgttggaagagtcctcatccctcttggagccaagtgagatgggaagaggcactcctttaagacttggcttcgtggctggtgtcattaaccgggagcgcatccctacttttgagcgcatgctttggcgggtatgccggggaaatgtgttcctgcgacaggctgaaatcgagaaccccctggaggatcctgtgactggcgactacgtgcacaagtctgtgtttatcattttcttccaaggcgatcagctgaaaaacagagtcaagaaaatctgtgaagggttccgagcctcactctatccctgtcctgagacaccacaggagaggaaggaaatggcttctggagtgaataccaggattgatgatctccaaatggttctgaatcaaacggaggatcaccgccagagggttctgcaggcagctgctaagaacatccgtgtctggttcatcaaagtgcggaagatgaaggccatctatcacaccctgaacctgtgcaacatagatgtgactcagaaatgcttgattgcagaggtctggtgccctgtcaccgaccttgactccatccagtttgcactcagaaggggcacggaacacagtggttccactgtaccttccattttgaacaggatgcagacaaaccagactcccccaacctataacaaaaccaacaagtttacctatggctttcagaacatagtagatgcttatggaattggaacttaccgagagataaatccagctccgtatactattatcacgttcccttttctatttgctgtgatgtttggagacttcggtcatggcattttaatgaccctttttgctgtgtggatggtactgagggagagccggatcctttcccagaagaatgagaatgagatgtttagcactgtgttcagtggtcgatacattattttattgatgggtgtgttctccatgtacactggcctcatctacaatgattgcttttccaagtctcttaatatctttgggtcatcctggagtgtacggccgatgtttacttataattggactgaagagacgcttcgggggaaccctgttctacagctgaacccagccctccctggagtgtttggtggaccatacccttttggcattgatccaatttggaacattgctaccaataaactgacgttcttgaactcctttaagatgaagatgtctgttatccttggtatcatccatatgctgtttggagtcagcctgagtctgttcaaccatatctatttcaagaagcccctgaatatctactttggatttattcctgaaataatcttcatgacctctttgtttggctatttggttatccttattttttacaagtggacggcctatgatgctcatacctctgagaatgcaccaagccttctgatccatttcataaacatgttcctcttttcctacccagagtctggttattcaatgttgtattctggacagaaaggaattcagtgtttcctggtagtggttgcactactgtgtgtaccttggatgctgctgtttaaaccattggtccttcgccgtcagtatttgaggagaaagcatttgggaactctcaactttggtgggatcagggtgggcaacggaccgacagaggaggatgctgagattattcagcatgaccagctctccacccactcagaggacgcagacgagccttccgaggacgaagtgtttgactttggggacaccatggtccaccaggccatccacaccatcgagtactgcctgggctgcatctccaacactgcctcctacttgcggctctgggccctcagcctcgctcatgcgcagctgtctgaggtgctttggaccatggtgatccacatcggcctgagcgtgaagagcttggcgggaggtttggtgctgttcttcttcttcactgcctttgccaccctgaccgtggccatcctcctgatcatggagggcctctcggcctttctccacgcactgcgcttacactgggttgagttccagaataaattctacagcgggaccggtttcaagttcttacccttctccttcgagcatattcgggaagggaagtttgaagagtgagtccctgtgagggccgtgtgccccatgctaccctccccgcctccctccacagtgatcagctgtgcctctctgcctgttggttgtgatctgtgggcaccagctcattcgtgtcaccctgtctgtgagtcatttagatagaatagtcctccttgggtctcccaccacccctagctttgtgtgtagtgtagtgattttctggctgtcactcatactcactgggcaccagccttgccctcttagcctccatccatccagacagcccttcccacctcctggtggtgagccagtctgcattcccacgccatcccaaagccctttcatcttccccgtgcattgtagatggaaggagcacccatgccattcacatctagactttgagttccctgcatctgccaccgtagtttctagcaggagtagtggggggagtaatacagattcttccctagaaggggacactggtaacatgtcccactcttggattagcaggggtgggtccaggaagatgatatttgcgtcttttgcccacccccctggcattcagctggacccaactaggccatcatgagtggcttctccctgtcatccccaggggtcataggatatctacaccgcctttctgaccccaccctgcactcccatcctttcctctctccccgttcatgccctgcactacatagcacagccgggatgcttggaacagaggccttggctgctccgcagtgcacagggcttccctctctcggggttggcttcttcccaggccttgcatgggccctgcccacaagcacaccctcaggccgagggtgcagactgatgctcttccctgatggagaccctgagatcttccccacccccaatcatgatgtcttcagtgtgggactggggtcctcttggttctgcctgcagcctgcctggctccgcccctagtgccccctcctcaccacactggccccaggtctcaggaggggtgtcctgggcagggaaggtcagtgtcactgatggtttgctgtttggaagccattggcagggctgccgtgcatgtggctgtgagggctgcacagtcctgccaaggggcttcctccttgtcaccccgaaccttgtaatcgtgtgctggcgtggcagccctggctaagttaatccccaccgctttcagtggtagaaagaattccctgagtgggccaggctggtgccctcctcctaccctggcttttctgagtgagctgcctggagccctcatcccctctcccaggctgggctggccctgggcggggccactgtgtgctggcccactgtgacctgacccgaccttgtgcagcccccctgccctggtgtcctgggttttcgtgatgatctttgctctgtttccagtggggtttgaagcagagttcagggaaccctgcccaaggtcctcctgttcagacattcctatgttgaataaagtatgtttgacttccccggaaaaaaaaaaaaaaaaaaaaaaaaaaaaaaaaaaaaaaaaaaaaaaaaaaaaaaaaaaaaaaaaaa

SEQ ID NO: 272 - protein, 837 aa, Homo sapiens
MGELFRSEEMTLAQLFLQSEAAYCCVSELGELGKVQFRDLNPDVNVFQRKFVNEVRRCEEMDRKLRFVEKEIRKANIPIMDTGENPEVPFPRDMIDLEANFEKIENELKEINTNQEALKRNFLELTELKFILRKTQQFFDEMADPDLLEESSSLLEPSEMGRGTPLRLGFVAGVINRERIPTFERMLWRVCRGNVFLRQAEIENPLEDPVTGDYVHKSVFIIFFQGDQLKNRVKKICEGFRASLYPCPETPQERKEMASGVNTRIDDLQMVLNQTEDHRQRVLQAAAKNIRVWFIKVRKMKAIYHTLNLCNIDVTQKCLIAEVWCPVTDLDSIQFALRRGTEHSGSTVPSILNRMQTNQTPPTYNKTNKFTYGFQNIVDAYGIGTYREINPAPYTIITFPFLFAVMFGDFGHGILMTLFAVWMVLRESRILSQKNENEMFSTVFSGRYIILLMGVFSMYTGLIYNDCFSKSLNIFGSSWSVRPMFTYNWTEETLRGNPVLQLNPALPGVFGGPYPFGIDPIWNIATNKLTFLNSFKMKMSVILGIIHMLFGVSLSLFNHIYFKKPLNIYFGFIPEIIFMTSLFGYLVILIFYKWTAYDAHTSENAPSLLIHFINMFLFSYPESGYSMLYSGQKGIQCFLVVVALLCVPWMLLFKPLVLRRQYLRRKHLGTLNFGGIRVGNGPTEEDAEIIQHDQLSTHSEDADEPSEDEVFDFGDTMVHQAIHTIEYCLGCISNTASYLRLWALSLAHAQLSEVLWTMVIHIGLSVKSLAGGLVLFFFFTAFATLTVAILLIMEGLSAFLHALRLHWVEFQNKFYSGTGFKFLPFSFEHIREGKFEE

SEQ ID NO: 273 - DNA, 4187 bp, Homo sapiens
ggcggcgcaggggcggggctttacggacgcaagcacgtcgaagcgctgctcctggagccgcggagggtgcgggtttggctgcggtggtttctgtggcggttgctgtggcggagtttggaggttggagagaaatccaggtactcactagactggtaccttctgccaccatgggggagcttttccggagtgaagaaatgacactggcccagctttttctacagtcagaggctgcttattgttgtgtcagtgaattaggagaacttggaaaggttcagtttcgtgacttaaatccagatgtgaatgttttccaacggaaatttgtgaatgaagttagaagatgtgaagaaatggatcgaaagcttcgatttgttgagaaagagataagaaaagctaacattccgattatggacaccggtgaaaacccagaggttcccttcccccgggacatgattgacttagaggccaattttgagaagattgaaaatgaactgaaggaaatcaacacaaaccaggaagctctgaagagaaacttcctggaactgaccgaattaaaatttatacttcgcaaaactcagcaattttttgatgagatggcggatccagacttgttggaagagtcctcatccctcttggagccaagtgagatgggaagaggcactcctttaagacttggcttcgtggctggtgtcattaaccgggagcgcatccctacttttgagcgcatgctttggcgggtatgccggggaaatgtgttcctgcgacaggctgaaatcgagaaccccctggaggatcctgtgactggcgactacgtgcacaagtctgtgtttatcattttcttccaaggcgatcagctgaaaaacagagtcaagaaaatctgtgaagggttccgagcctcactctatccctgtcctgagacaccacaggagaggaaggaaatggcttctggagtgaataccaggattgatgatctccaaatggttctgaatcaaacggaggatcaccgccagagggttctgcaggcagctgctaagaacatccgtgtctggttcatcaaagtgcggaagatgaaggccatctatcacaccctgaacctgtgcaacatagatgtgactcagaaatgcttgattgcagaggtctggtgccctgtcaccgaccttgactccatccagtttgcactcagaaggggcacggaacacagtggttccactgtaccttccattttgaacaggatgcagacaaaccagactcccccaacctataacaaaaccaacaagtttacctatggctttcagaacatagtagatgcttatggaattggaacttaccgagagataaatccagctccgtatactattatcacgttcccttttctatttgctgtgatgtttggagacttcggtcatggcattttaatgaccctttttgctgtgtggatggtactgagggagagccggatcctttcccagaagaatgagaatgagatgtttagcactgtgttcagtggtcgatacattattttattgatgggtgtgttctccatgtacactggcctcatctacaatgattgcttttccaagtctcttaatatctttgggtcatcctggagtgtacggccgatgtttacttataattggactgaagagacgcttcgggggaaccctgttctacagctgaacccagccctccctggagtgtttggtggaccatacccttttggcattgatccaatttggaacattgctaccaataaactgacgttcttgaactcctttaagatgaagatgtctgttatccttggtatcatccatatgctgtttggagtcagcctgagtctgttcaaccatatctatttcaagaagcccctgaatatctactttggatttattcctgaaataatcttcatgacctctttgtttggctatttggttatccttattttttacaagtggacggcctatgatgctcatacctctgagaatgcaccaagccttctgatccatttcataaacatgttcctcttttcctacccagagtctggttattcaatgttgtattctggacagaaaggaattcagtgtttcctggtagtggttgcactactgtgtgtaccttggatgctgctgtttaaaccattggtccttcgccgtcagtatttgaggagaaagcatttgggaactctcaactttggtgggatcagggtgggcaacggaccgacagaggaggatgctgagattattcagcatgaccagctctccacccactcagaggacgcagacgagtttgactttggggacaccatggtccaccaggccatccacaccatcgagtactgcctgggctgcatctccaacactgcctcctacttgcggctctgggccctcagcctcgctcatgcgcagctgtctgaggtgctttggaccatggtgatccacatcggcctgagcgtgaagagcttggcgggaggtttggtgctgttcttcttcttcactgcctttgccaccctgaccgtggccatcctcctgatcatggagggcctctcggcctttctccacgcactgcgcttacactgggttgagttccagaataaattctacagcgggaccggtttcaagttcttacccttctccttcgagcatattcgggaagggaagtttgaagagtgagtccctgtgagggccgtgtgccccatgctaccctccccgcctccctccacagtgatcagctgtgcctctctgcctgttggttgtgatctgtgggcaccagctcattcgtgtcaccctgtctgtgagtcatttagatagaatagtcctccttgggtctcccaccacccctagctttgtgtgtagtgtagtgattttctggctgtcactcatactcactgggcaccagccttgccctcttagcctccatccatccagacagcccttcccacctcctggtggtgagccagtctgcattcccacgccatcccaaagccctttcatcttccccgtgcattgtagatggaaggagcacccatgccattcacatctagactttgagttccctgcatctgccaccgtagtttctagcaggagtagtggggggagtaatacagattcttccctagaaggggacactggtaacatgtcccactcttggattagcaggggtgggtccaggaagatgatatttgcgtcttttgcccacccccctggcattcagctggacccaactaggccatcatgagtggcttctccctgtcatccccaggggtcataggatatctacaccgcctttctgaccccaccctgcactcccatcctttcctctctccccgttcatgccctgcactacatagcacagccgggatgcttggaacagaggccttggctgctccgcagtgcacagggcttccctctctcggggttggcttcttcccaggccttgcatgggccctgcccacaagcacaccctcaggccgagggtgcagactgatgctcttccctgatggagaccctgagatcttccccacccccaatcatgatgtcttcagtgtgggactggggtcctcttggttctgcctgcagcctgcctggctccgcccctagtgccccctcctcaccacactggccccaggtctcaggaggggtgtcctgggcagggaaggtcagtgtcactgatggtttgctgtttggaagccattggcagggctgccgtgcatgtggctgtgagggctgcacagtcctgccaaggggcttcctccttgtcaccccgaaccttgtaatcgtgtgctggcgtggcagccctggctaagttaatccccaccgctttcagtggtagaaagaattccctgagtgggccaggctggtgccctcctcctaccctggcttttctgagtgagctgcctggagccctcatcccctctcccaggctgggctggccctgggcggggccactgtgtgctggcccactgtgacctgacccgaccttgtgcagcccccctgccctggtgtcctgggttttcgtgatgatctttgctctgtttccagtggggtttgaagcagagttcagggaaccctgcccaaggtcctcctgttcagacattcctatgttgaataaagtatgtttgacttccccggaaaaaaaaaaaaaaaaaaaaaaaaaaaaaaaaaaaaaaaaaaaaaaaaaaaaaaaaaaaaaaaaaa

SEQ ID NO: 274 - protein, 831 aa, Homo sapiens
MGELFRSEEMTLAQLFLQSEAAYCCVSELGELGKVQFRDLNPDVNVFQRKFVNEVRRCEEMDRKLRFVEKEIRKANIPIMDTGENPEVPFPRDMIDLEANFEKIENELKEINTNQEALKRNFLELTELKFILRKTQQFFDEMADPDLLEESSSLLEPSEMGRGTPLRLGFVAGVINRERIPTFERMLWRVCRGNVFLRQAEIENPLEDPVTGDYVHKSVFIIFFQGDQLKNRVKKICEGFRASLYPCPETPQERKEMASGVNTRIDDLQMVLNQTEDHRQRVLQAAAKNIRVWFIKVRKMKAIYHTLNLCNIDVTQKCLIAEVWCPVTDLDSIQFALRRGTEHSGSTVPSILNRMQTNQTPPTYNKTNKFTYGFQNIVDAYGIGTYREINPAPYTIITFPFLFAVMFGDFGHGILMTLFAVWMVLRESRILSQKNENEMFSTVFSGRYIILLMGVFSMYTGLIYNDCFSKSLNIFGSSWSVRPMFTYNWTEETLRGNPVLQLNPALPGVFGGPYPFGIDPIWNIATNKLTFLNSFKMKMSVILGIIHMLFGVSLSLFNHIYFKKPLNIYFGFIPEIIFMTSLFGYLVILIFYKWTAYDAHTSENAPSLLIHFINMFLFSYPESGYSMLYSGQKGIQCFLVVVALLCVPWMLLFKPLVLRRQYLRRKHLGTLNFGGIRVGNGPTEEDAEIIQHDQLSTHSEDADEFDFGDTMVHQAIHTIEYCLGCISNTASYLRLWALSLAHAQLSEVLWTMVIHIGLSVKSLAGGLVLFFFFTAFATLTVAILLIMEGLSAFLHALRLHWVEFQNKFYSGTGFKFLPFSFEHIREGKFEE

SEQ ID NO: 275 - DNA, 4176 bp, Homo sapiens
ggcggtcccctgttctccccgctcaggtgcggcgctgtggcaggaagccaccccctcggtcggccggtgcgcggggctgttgcgccatccgctccggctttcgtaaccgcaccctgggacggcccagagacgctccagcgcgagttcctcaaatgttttcctgcgttgccaggaccgtccgccgctctgagtcatgtgcgagtgggaagtcgcactgacactgagccgggccagagggagaggagccgagcgcggcgcggggccgagggactcgcagtgtgtgtagagagccgggctcctgcggatgggggctgcccccggggcctgagcccgcctgcccgcccaccgccccgccccgcccctgccacccctgccgcccggttcccattagcctgtccgcctctgcgggaccatggagtggtagccgaggaggaagcatgctggccgtcggctgcgcgctgctggctgccctgctggccgcgccgggagcggcgctggccccaaggcgctgccctgcgcaggaggtggcgagaggcgtgctgaccagtctgccaggagacagcgtgactctgacctgcccgggggtagagccggaagacaatgccactgttcactgggtgctcaggaagccggctgcaggctcccaccccagcagatgggctggcatgggaaggaggctgctgctgaggtcggtgcagctccacgactctggaaactattcatgctaccgggccggccgcccagctgggactgtgcacttgctggtggatgttccccccgaggagccccagctctcctgcttccggaagagccccctcagcaatgttgtttgtgagtggggtcctcggagcaccccatccctgacgacaaaggctgtgctcttggtgaggaagtttcagaacagtccggccgaagacttccaggagccgtgccagtattcccaggagtcccagaagttctcctgccagttagcagtcccggagggagacagctctttctacatagtgtccatgtgcgtcgccagtagtgtcgggagcaagttcagcaaaactcaaacctttcagggttgtggaatcttgcagcctgatccgcctgccaacatcacagtcactgccgtggccagaaacccccgctggctcagtgtcacctggcaagacccccactcctggaactcatctttctacagactacggtttgagctcagatatcgggctgaacggtcaaagacattcacaacatggatggtcaaggacctccagcatcactgtgtcatccacgacgcctggagcggcctgaggcacgtggtgcagcttcgtgcccaggaggagttcgggcaaggcgagtggagcgagtggagcccggaggccatgggcacgccttggacagaatccaggagtcctccagctgagaacgaggtgtccacccccatgcaggcacttactactaataaagacgatgataatattctcttcagagattctgcaaatgcgacaagcctcccagtgcaagattcttcttcagtaccactgcccacattcctggttgctggagggagcctggccttcggaacgctcctctgcattgccattgttctgaggttcaagaagacgtggaagctgcgggctctgaaggaaggcaagacaagcatgcatccgccgtactctttggggcagctggtcccggagaggcctcgacccaccccagtgcttgttcctctcatctccccaccggtgtcccccagcagcctggggtctgacaatacctcgagccacaaccgaccagatgccagggacccacggagcccttatgacatcagcaatacagactacttcttccccagatagctggctgggtggcaccagcagcctggaccctgtggatgataaaacacaaacgggctcagcaaaagatgcttctcactgccatgccagcttatctcaggggtgtgcggcctttggcttcacggaagagccttgcggaaggttctacgccaggggaaaatcagcctgctccagctgttcagctggttgaggtttcaaacctccctttccaaatgcccagcttaaaggggctagagtgaacttgggccactgtgaagagaaccatatcaagactctttggacactcacacggacactcaaaagctgggcaggttggtgggggcctcggtgtggagaagcggctggcagcccacccctcaacacctctgcacaagctgcaccctcaggcaggtgggatggatttccagccaaagcctcctccagccgccatgctcctggcccactgcatcgtttcatcttccaactcaaactcttaaaacccaagtgccttagcaaattctgtttttctaggcctggggacggcttttacttaaaccgccaaggctgggggaagaagctctctcctccctttcttccctacagttgaaaaacagctgagggtgagtgggtgaataatacagtatctcagggcctggtcgttttcaacagaattataattagttcctcattagcattttgctaaatgtgaatgatgatcctaggcatttgctgaatacagaggcaactgcattggctttgggttgcaggacctcaggtgagaagcagaggaaggagaggagaggggcacagggtctctaccatcccctgtagagtgggagctgagtgggggatcacagcctctgaaaaccaatgttctctcttctccacctcccacaaaggagagctagcagcagggagggcttctgccatttctgagatcaaaacggttttactgcagctttgtttgttgtcagctgaacctgggtaactagggaagataatattaaggaagacaatgtgaaaagaaaaatgagcctggcaagaatgtgtttaaacttggtttttaaaaaactgctgactgttttctcttgagagggtggaatatccaatattcgctgtgtcagcatagaagtaacttacttaggtgtgggggaagcaccataactttgtttagcccaaaaccaagtcaagtgaaaaaggaggaagagaaaaaatattttcctgccaggcatggtggcccacgcacttcgggaggtcgaggcaggaggatcacttgagtccagaagtttgagatcagcctgggcaatgtgataaaaccccatctctacaaaaagcataaaaattagccaagtgtggtagagtgtgcctgaagtcccagatacttggggggctgaggtgggaggatctcttgagcctgggaggtcaaggctgcagtgagccgagattgcaccactgcactccagcctgggtgacagagcaagtgagaccctgtctcaaaaaaagaaaaagaaaaagaaaaaatattttccctattagagaagagattgtggtttcattctgtattttgtttttgtcttaaaaagtggaaaaatagcctgcctcttctctactctagggaaaaaccagcgtgtgactactcccccaggtggttatggagagggtgtccggtccctgtcccagtgccgagaaggaagcctcccacgactgcccggcagggtcctagaaattccccaccctgaaagccctgagctttctgctatcaaagaggttttaaaaaaatcccatttaaaaaaaatcccttacctcggtgccttcctctttttatttagttccttgagttgattcagctctgcaagaattgaagcaggactaaatgtctagttgtaacaccatgattaaccacttcagctgacttttctgtccgagctttgaaaattcagtggtgttagtggttacccagttagctctcaagttatcagggtattccagagtggggatatgatttaaatcagccgtgtaaccatggacccaatatttaccagaccacaaaacttttctaatactctaccctcttagaaaaaccaccaccatcaccagacaggtgcgaaaggatgaaagtgaccatgttttgtttacggttttccaggtttaagctgttactgtcttcagtaagccgtgattttcattgctgggcttgtctgtagattttagaccctattgctgcttgaggcaactcatcttaggttggcaaaaaggcaggatggccgggcgcggtggctcacgcctgtaatcctagcactttgggaggccaaggtgggaggattgcttgagctcaggagtttgagaccaacctggg

SEQ ID NO: 276 - protein, 468 aa, Homo sapiens
MLAVGCALLAALLAAPGAALAPRRCPAQEVARGVLTSLPGDSVTLTCPGVEPEDNATVHWVLRKPAAGSHPSRWAGMGRRLLLRSVQLHDSGNYSCYRAGRPAGTVHLLVDVPPEEPQLSCFRKSPLSNVVCEWGPRSTPSLTTKAVLLVRKFQNSPAEDFQEPCQYSQESQKFSCQLAVPEGDSSFYIVSMCVASSVGSKFSKTQTFQGCGILQPDPPANITVTAVARNPRWLSVTWQDPHSWNSSFYRLRFELRYRAERSKTFTTWMVKDLQHHCVIHDAWSGLRHVVQLRAQEEFGQGEWSEWSPEAMGTPWTESRSPPAENEVSTPMQALTTNKDDDNILFRDSANATSLPVQDSSSVPLPTFLVAGGSLAFGTLLCIAIVLRFKKTWKLRALKEGKTSMHPPYSLGQLVPERPRPTPVLVPLISPPVSPSSLGSDNTSSHNRPDARDPRSPYDISNTDYFFPR

SEQ ID NO: 277 - DNA, 4082 bp, Homo sapiens
ggcggtcccctgttctccccgctcaggtgcggcgctgtggcaggaagccaccccctcggtcggccggtgcgcggggctgttgcgccatccgctccggctttcgtaaccgcaccctgggacggcccagagacgctccagcgcgagttcctcaaatgttttcctgcgttgccaggaccgtccgccgctctgagtcatgtgcgagtgggaagtcgcactgacactgagccgggccagagggagaggagccgagcgcggcgcggggccgagggactcgcagtgtgtgtagagagccgggctcctgcggatgggggctgcccccggggcctgagcccgcctgcccgcccaccgccccgccccgcccctgccacccctgccgcccggttcccattagcctgtccgcctctgcgggaccatggagtggtagccgaggaggaagcatgctggccgtcggctgcgcgctgctggctgccctgctggccgcgccgggagcggcgctggccccaaggcgctgccctgcgcaggaggtggcgagaggcgtgctgaccagtctgccaggagacagcgtgactctgacctgcccgggggtagagccggaagacaatgccactgttcactgggtgctcaggaagccggctgcaggctcccaccccagcagatgggctggcatgggaaggaggctgctgctgaggtcggtgcagctccacgactctggaaactattcatgctaccgggccggccgcccagctgggactgtgcacttgctggtggatgttccccccgaggagccccagctctcctgcttccggaagagccccctcagcaatgttgtttgtgagtggggtcctcggagcaccccatccctgacgacaaaggctgtgctcttggtgaggaagtttcagaacagtccggccgaagacttccaggagccgtgccagtattcccaggagtcccagaagttctcctgccagttagcagtcccggagggagacagctctttctacatagtgtccatgtgcgtcgccagtagtgtcgggagcaagttcagcaaaactcaaacctttcagggttgtggaatcttgcagcctgatccgcctgccaacatcacagtcactgccgtggccagaaacccccgctggctcagtgtcacctggcaagacccccactcctggaactcatctttctacagactacggtttgagctcagatatcgggctgaacggtcaaagacattcacaacatggatggtcaaggacctccagcatcactgtgtcatccacgacgcctggagcggcctgaggcacgtggtgcagcttcgtgcccaggaggagttcgggcaaggcgagtggagcgagtggagcccggaggccatgggcacgccttggacagaatccaggagtcctccagctgagaacgaggtgtccacccccatgcaggcacttactactaataaagacgatgataatattctcttcagagattctgcaaatgcgacaagcctcccaggttcaagaagacgtggaagctgcgggctctgaaggaaggcaagacaagcatgcatccgccgtactctttggggcagctggtcccggagaggcctcgacccaccccagtgcttgttcctctcatctccccaccggtgtcccccagcagcctggggtctgacaatacctcgagccacaaccgaccagatgccagggacccacggagcccttatgacatcagcaatacagactacttcttccccagatagctggctgggtggcaccagcagcctggaccctgtggatgataaaacacaaacgggctcagcaaaagatgcttctcactgccatgccagcttatctcaggggtgtgcggcctttggcttcacggaagagccttgcggaaggttctacgccaggggaaaatcagcctgctccagctgttcagctggttgaggtttcaaacctccctttccaaatgcccagcttaaaggggctagagtgaacttgggccactgtgaagagaaccatatcaagactctttggacactcacacggacactcaaaagctgggcaggttggtgggggcctcggtgtggagaagcggctggcagcccacccctcaacacctctgcacaagctgcaccctcaggcaggtgggatggatttccagccaaagcctcctccagccgccatgctcctggcccactgcatcgtttcatcttccaactcaaactcttaaaacccaagtgccttagcaaattctgtttttctaggcctggggacggcttttacttaaaccgccaaggctgggggaagaagctctctcctccctttcttccctacagttgaaaaacagctgagggtgagtgggtgaataatacagtatctcagggcctggtcgttttcaacagaattataattagttcctcattagcattttgctaaatgtgaatgatgatcctaggcatttgctgaatacagaggcaactgcattggctttgggttgcaggacctcaggtgagaagcagaggaaggagaggagaggggcacagggtctctaccatcccctgtagagtgggagctgagtgggggatcacagcctctgaaaaccaatgttctctcttctccacctcccacaaaggagagctagcagcagggagggcttctgccatttctgagatcaaaacggttttactgcagctttgtttgttgtcagctgaacctgggtaactagggaagataatattaaggaagacaatgtgaaaagaaaaatgagcctggcaagaatgtgtttaaacttggtttttaaaaaactgctgactgttttctcttgagagggtggaatatccaatattcgctgtgtcagcatagaagtaacttacttaggtgtgggggaagcaccataactttgtttagcccaaaaccaagtcaagtgaaaaaggaggaagagaaaaaatattttcctgccaggcatggtggcccacgcacttcgggaggtcgaggcaggaggatcacttgagtccagaagtttgagatcagcctgggcaatgtgataaaaccccatctctacaaaaagcataaaaattagccaagtgtggtagagtgtgcctgaagtcccagatacttggggggctgaggtgggaggatctcttgagcctgggaggtcaaggctgcagtgagccgagattgcaccactgcactccagcctgggtgacagagcaagtgagaccctgtctcaaaaaaagaaaaagaaaaagaaaaaatattttccctattagagaagagattgtggtttcattctgtattttgtttttgtcttaaaaagtggaaaaatagcctgcctcttctctactctagggaaaaaccagcgtgtgactactcccccaggtggttatggagagggtgtccggtccctgtcccagtgccgagaaggaagcctcccacgactgcccggcagggtcctagaaattccccaccctgaaagccctgagctttctgctatcaaagaggttttaaaaaaatcccatttaaaaaaaatcccttacctcggtgccttcctctttttatttagttccttgagttgattcagctctgcaagaattgaagcaggactaaatgtctagttgtaacaccatgattaaccacttcagctgacttttctgtccgagctttgaaaattcagtggtgttagtggttacccagttagctctcaagttatcagggtattccagagtggggatatgatttaaatcagccgtgtaaccatggacccaatatttaccagaccacaaaacttttctaatactctaccctcttagaaaaaccaccaccatcaccagacaggtgcgaaaggatgaaagtgaccatgttttgtttacggttttccaggtttaagctgttactgtcttcagtaagccgtgattttcattgctgggcttgtctgtagattttagaccctattgctgcttgaggcaactcatcttaggttggcaaaaaggcaggatggccgggcgcggtggctcacgcctgtaatcctagcactttgggaggccaaggtgggaggattgcttgagctcaggagtttgagaccaacctggg

SEQ ID NO: 278 - protein, 365 aa, Homo sapiens [sequence omitted]

SEQ ID NO: 279 - DNA, 826 bp, Homo sapiens
tcatgtgacaaagcgcaggacccctcactgccccaactgcttgctgttctctctttcttgggctctaaggacccaggagtctgggtgcacagcctccttctctctgagattcaagagtctgatcagcagcctcttcctcctccaggacccagaagccctgagcttatccccatggagctctgccggtccctggccctgctggggggctccctgggcctgatgttctgcctgattgctttgagcaccgatttctggtttgaggctgtgggtcccacccactcagctcactcgggcctctggccaacagggcatggggacatcatatcaggctacatccacgtgacgcagaccttcagcattatggctgttctgtgggccctggtgtccgtgagcttcctggtcctgtcctgcttcccctcactgttccccccaggccacggcccgcttgtctcaaccaccgcagcctttgctgcagccatctccatggtggtggccatggcggtgtacaccagcgagcggtgggaccagcctccacacccccagatccagaccttcttctcctggtccttctacctgggctgggtctcagctatcctcttgctctgtacaggtgccctgagcctgggtgctcactgtggcggtccccgtcctggctatgaaaccttgtgagcagaaggcaagagcggcaagatgagttttgagcgttgtattccaaaggcctcatctggagcctcgggaaagtctggtcccacatctgcccgcccttccagcccttccccagcccctcctcttgtttcttcattcattcaacaaaatttggctggaa

SEQ ID NO: 280 - protein, 165 aa, Homo sapiens
MELCRSLALLGGSLGLMFCLIALSTDFWFEAVGPTHSAHSGLWPTGHGDIISGYIHVTQTFSIMAVLWALVSVSFLVLSCFPSLFPPGHGPLVSTTAAFAAAISMVVAMAVYTSERWDQPPHPQIQTFFSWSFYLGWVSAILLLCTGALSLGAHCGGPRPGYETL

SEQ ID NO: 281 - DNA, 1742 bp, Homo sapiens
  CDS (76)..(1452)
caagcccagagccctgccatttctgtgggctcaggtccctactgctcagccccttcctccctcggcaaggccacaatgaaccggggagtcccttttaggcacttgcttctggtgctgcaactggcgctcctcccagcagccactcagggaaagaaagtggtgctgggcaaaaaaggggatacagtggaactgacctgtacagcttcccagaagaagagcatacaattccactggaaaaactccaaccagataaagattctgggaaatcagggctccttcttaactaaaggtccatccaagctgaatgatcgcgctgactcaagaagaagcctttgggaccaaggaaacttccccctgatcatcaagaatcttaagatagaagactcagatacttacatctgtgaagtggaggaccagaaggaggaggtgcaattgctagtgttcggattgactgccaactctgacacccacctgcttcaggggcagagcctgaccctgaccttggagagcccccctggtagtagcccctcagtgcaatgtaggagtccaaggggtaaaaacatacagggggggaagaccctctccgtgtctcagctggagctccaggatagtggcacctggacatgcactgtcttgcagaaccagaagaaggtggagttcaaaatagacatcgtggtgctagctttccagaaggcctccagcatagtctataagaaagagggggaacaggtggagttctccttcccactcgcctttacagttgaaaagctgacgggcagtggcgagctgtggtggcaggcggagagggcttcctcctccaagtcttggatcacctttgacctgaagaacaaggaagtgtctgtaaaatgggttacccaggaccctaagctccagatgggcaagaagctcccgctccacctcaccctgccccaggccttgcctcagtatgctggctctggaaacctcaccctggcccttgaagcgaaaacaggaaagttgcatcaggaagtgaacctggtggtgatgagagccactcagctccagaaaaatttgacctgtgaggtgtggggacccacctcccctaagctgatgctgagcttgaaactggagaacaaggaggcaaaggtctcgaagcgggagaaggcggtgtgggtgctgaaccctgaggcggggatgtggcagtgtctgctgagtgactcgggacaggtcctgctggaatccaacatcaaggttctgcccacatggtccaccccggtgcagccaatggccctgattgtgctggggggcgtcgccggcctcctgcttttcattgggctaggcatcttcttctgtgtcaggtgccggcaccgaaggcgccaagcagagcggatgtctcagatcaagagactcctcagtgagaagaagacctgccagtgccctcaccggtttcagaagacatgtagccccatttgaggcacgaggccaggcagatcccacttgcagcctccccaggtgtctgccccgcgtttcctgcctgcggaccagatgaatgtagcagatcccacgctctggcctcctgttcgtcctccctacaatttgccattgtttctcctgggttaggccccggcttcactggttgagtgttgctctctagtttccagaggcttaatcacaccgtcctccacgccatttccttttccttcaagcctagcccttctctcattatttctctctgaccctctccccactgctcatttggatcc

SEQ ID NO: 282 - protein, 458 aa, Homo sapiens [sequence omitted]

SEQ ID NO: 283 - DNA, 2308 bp, Homo sapiens
  CDS (160)..(978)
gagagactggatggacccacaagggtgacagcccaggcggaccgatcttcccatcccacatcctccggcgcgatgccaaaaagaggctgacggcaactgggccttctgcagagaaagacctccgcttcactgccccggctggtcccaagggtcaggaagatggattcatacctgctgatgtggggactgctcacgttcatcatggtgcctggctgccaggcagagctctgtgacgatgacccgccagagatcccacacgccacattcaaagccatggcctacaaggaaggaaccatgttgaactgtgaatgcaagagaggtttccgcagaataaaaagcgggtcactctatatgctctgtacaggaaactctagccactcgtcctgggacaaccaatgtcaatgcacaagctctgccactcggaacacaacgaaacaagtgacacctcaacctgaagaacagaaagaaaggaaaaccacagaaatgcaaagtccaatgcagccagtggaccaagcgagccttccaggtcactgcagggaacctccaccatgggaaaatgaagccacagagagaatttatcatttcgtggtggggcagatggtttattatcagtgcgtccagggatacagggctctacacagaggtcctgctgagagcgtctgcaaaatgacccacgggaagacaaggtggacccagccccagctcatatgcacaggtgaaatggagaccagtcagtttccaggtgaagagaagcctcaggcaagccccgaaggccgtcctgagagtgagacttcctgcctcgtcacaacaacagattttcaaatacagacagaaatggctgcaaccatggagacgtccatatttacaacagagtaccaggtagcagtggccggctgtgttttcctgctgatcagcgtcctcctcctgagtgggctcacctggcagcggagacagaggaagagtagaagaacaatctagaaaaccaaaagaacaagaatttcttggtaagaagccgggaacagacaacagaagtcatgaagcccaagtgaaatcaaaggtgctaaatggtcgcccaggagacatccgttgtgcttgcctgcgttttggaagctctgaagtcacatcacaggacacggggcagtggcaaccttgtctctatgccagctcagtcccatcagagagcgagcgctacccacttctaaatagcaatttcgccgttgaagaggaagggcaaaaccactagaactctccatcttattttcatgtatatgtgttcattaaagcatgaatggtatggaactctctccaccctatatgtagtataaagaaaagtaggtttacattcatctcattccaacttcccagttcaggagtcccaaggaaagccccagcactaacgtaaatacacaacacacacactctaccctatacaactggacattgtctgcgtggttcctttctcagccgcttctgactgctgattctcccgttcacgttgcctaataaacatccttcaagaactctgggctgctacccagaaatcattttacccttggctcaatcctctaagctaacccccttctactgagccttcagtcttgaatttctaaaaaacagaggccatggcagaataatctttgggtaacttcaaaacggggcagccaaacccatgaggcaatgtcaggaacagaaggatgaatgaggtcccaggcagagaatcatacttagcaaagttttacctgtgcgttactaattggcctctttaagagttagtttctttgggattgctatgaatgataccctgaatttggcctgcactaatttgatgtttacaggtggacacacaaggtgcaaatcaatgcgtacgtttcctgagaagtgtctaaaaacaccaaaaagggatccgtacattcaatgtttatgcaaggaaggaaagaaagaaggaagtgaagagggagaagggatggaggtcacactggtagaacgtaaccacggaaaagagcgcatcaggcctggcacggtggctcaggcctataaccccagctccctaggagaccaaggcgggagcatctcttgaggccaggagtttgagaccagcctgggcagcatagcaagacacatccctacaaaaaattagaaattggctggatgtggtggcatacgcctgtagtcctagccactcaggaggctgaggcaggaggattgcttgagcccaggagttcgaggctgcagtcagtcatgatggcaccactgcactccagcctgggcaacagagcaagatcctgtctttaaggaaaaaaagacaagg

SEQ ID NO: 284 - protein, 272 aa, Homo sapiens
MDSYLLMWGLLTFIMVPGCQAELCDDDPPEIPHATFKAMAYKEGTMLNCECKRGFRRIKSGSLYMLCTGNSSHSSWDNQCQCTSSATRNTTKQVTPQPEEQKERKTTEMQSPMQPVDQASLPGHCREPPPWENEATERIYHFVVGQMVYYQCVQGYRALHRGPAESVCKMTHGKTRWTQPQLICTGEMETSQFPGEEKPQASPEGRPESETSCLVTTTDFQIQTEMAATMETSIFTTEYQVAVAGCVFLLISVLLLSGLTWQRRQRKSRRTI

SEQ ID NO: 285 - DNA, 1869 bp, Homo sapiens
  CDS (189)..(1484)
gcacacactcatcgaaaaaaatttggattattagaagagagaggtctgcggcttccacaccgtacagcgtggtttttcttctcggtataaaagcaaagttgtttttgatacgtgacagtttcccacaagccaggctgatccttttctgtcagtccacttcaccaagcctgcccttggacaaggacccgatgcccaaccccaggcctggcaagccctcggccccttccttggcccttggcccatccccaggagcctcgcccagctggagggctgcacccaaagcctcagacctgctgggggcccggggcccagggggaaccttccagggccgagatcttcgaggcggggcccatgcctcctcttcttccttgaaccccatgccaccatcgcagctgcagctgcccacactgcccctagtcatggtggcaccctccggggcacggctgggccccttgccccacttacaggcactcctccaggacaggccacatttcatgcaccagctctcaacggtggatgcccacgcccggacccctgtgctgcaggtgcaccccctggagagcccagccatgatcagcctcacaccacccaccaccgccactggggtcttctccctcaaggcccggcctggcctcccacctgggatcaacgtggccagcctggaatgggtgtccagggagccggcactgctctgcaccttcccaaatcccagtgcacccaggaaggacagcaccctttcggctgtgccccagagctcctacccactgctggcaaatggtgtctgcaagtggcccggatgtgagaaggtcttcgaagagccagaggacttcctcaagcactgccaggcggaccatcttctggatgagaagggcagggcacaatgtctcctccagagagagatggtacagtctctggagcagcagctggtgctggagaaggagaagctgagtgccatgcaggcccacctggctgggaaaatggcactgaccaaggcttcatctgtggcatcatccgacaagggctcctgctgcatcgtagctgctggcagccaaggccctgtcgtcccagcctggtctggcccccgggaggcccctgacagcctgtttgctgtccggaggcacctgtggggtagccatggaaacagcacattcccagagttcctccacaacatggactacttcaagttccacaacatgcgaccccctttcacctacgccacgctcatccgctgggccatcctggaggctccagagaagcagcggacactcaatgagatctaccactggttcacacgcatgtttgccttcttcagaaaccatcctgccacctggaagaacgccatccgccacaacctgagtctgcacaagtgctttgtgcgggtggagagcgagaagggggctgtgtggaccgtggatgagctggagttccgcaagaaacggagccagaggcccagcaggtgttccaaccctacacctggcccctgacctcaagatcaaggaaaggaggatggacgaacaggggccaaactggtgggaggcagaggtggtgggggcagggatgataggccctggatgtgcccacagggaccaagaagtgaggtttccactgtcttgcctgccagggcccctgttcccccgctggcagccaccccctcccccatcatatcctttgccccaaggctgctcagaggggccccggtcctggccccagcccccacctccgccccagacacaccccccagtcgagccctgcagccaaacagagccttcacaaccagccacacagagcctgcctcagctgctcgcacagattacttcagggctggaaaagtcacacagacacacaaaatgtcacaatcctgtccctcac

SEQ ID NO: 286 - protein, 431 aa, Homo sapiens
MPNPRPGKPSAPSLALGPSPGASPSWRAAPKASDLLGARGPGGTFQGRDLRGGAHASSSSLNPMPPSQLQLPTLPLVMVAPSGARLGPLPHLQALLQDRPHFMHQLSTVDAHARTPVLQVHPLESPAMISLTPPTTATGVFSLKARPGLPPGINVASLEWVSREPALLCTFPNPSAPRKDSTLSAVPQSSYPLLANGVCKWPGCEKVFEEPEDFLKHCQADHLLDEKGRAQCLLQREMVQSLEQQLVLEKEKLSAMQAHLAGKMALTKASSVASSDKGSCCIVAAGSQGPVVPAWSGPREAPDSLFAVRRHLWGSHGNSTFPEFLHNMDYFKFHNMRPPFTYATLIRWAILEAPEKQRTLNEIYHWFTRMFAFFRNHPATWKNAIRHNLSLHKCFVRVESEKGAVWTVDELEFRKKRSQRPSRCSNPTPGP
